(19) United States
(12) Patent Application Publication
(10) Pub. No.: US 2003/0092124 A1
(43) Pub. Date: May 15, 2003

(54) Isolated G-protein coupled receptors, nucleic acid molecules encoding GPCR proteins, and uses thereof as insecticidal targets

(75) Inventor: Anibal Cravchik, Gaithersburg, MD (US)

Correspondence Address: CELERA GENOMICS CORP., ATTN: WAYNE MONTGOMERY, VICE PRES, INTEL PROPERTY, 45 WEST GUDE DRIVE, C2-4#20, ROCKVILLE, MD, 20850, US

(73) Assignee: APPLERA CORPORATION, Norwalk, CT

(21) Appl. No.: 10/270,333

(22) Filed: Oct. 15, 2002

Related U.S. Application Data
(63) Continuation of application No. 09/618,893, filed on Jul. 18, 2000.
(60) Provisional application No. 60/191,638, filed on Mar. 23, 2000.
(60) Provisional application No. 60/175,691, filed on Jan. 12, 2000.
(60) Provisional application No. 60/168,677, filed on Dec. 3, 1999.

(51) Int. Cl. C12P 21/02; C12N 5/06; C07K 14/705; C07H 21/04; A01N 61/00

(52) U.S. Cl. 435/69.1; 435/320.1; 435/348; 530/350; 536/23.5; 514/1

(57) ABSTRACT

The present invention provides amino acid sequences of proteins that are encoded by genes within the Drosophila melanogaster genome, the GPCR proteins of the present invention. The present invention specifically provides isolated protein and nucleic acid molecules, methods of identifying orthologs and paralogs of the GPCR proteins and methods of identifying modulators of the GPCR proteins for use as insecticides.

### FIELD OF THE INVENTION

[0001] The present invention is in the field of G-Protein coupled receptors (GPCRs), recombinant DNA molecules and protein production. The present invention specifically provides novel GPCR proteins and nucleic acid molecules encoding such protein molecules, for use in the development of insecticide and insecticide targets and as a source for identifying human therapeutics and human therapeutic development.

### BACKGROUND OF THE INVENTION

[0002] The Drosophila melanogaster genome is 165 Mb, with about 120 Mb of this being euchromatic. The genome is organized in 4 chromosome pairs and is estimated to contain 10-12,000 genes. Model organisms, such as Drosophila melanogaster, share many genes with humans whose sequences and functions have been conserved. In addition to myriad similarities in cellular structure and function, humans and Drosophila share pathways for intercellular signaling, developmental patterning, learning and behavior, as well as tumor formation and metastasis.

[0003] The genes involved in the development of Drosophila, with few exceptions, are the same as those involved in the development of higher organisms. Developmental biology studies the sequential activation and interaction of genes, in relation to developing morphology. Right now, Drosophila is the only organism for which one can begin with a list of genes active in the egg and follow the morphological changes and gene activations through to adulthood.

[0004] Drosophila studies have provided the widest knowledge base available for any single organism; accordingly, developmental biologists use the fly to ferret out the activity of genes with similar functions in higher organisms. Despite its small size, the fly is by no means a small developmental problem. If you know the genes involved in the development of the fly, you also know, to a reasonable approximation, the genes involved in the development of the worm, the fish, the mouse, and humans.

[0005] A major goal in drug/insecticide development is to understand and elucidate the molecular mechanisms that govern cell signaling and cell-cell interactions in higher eukaryotes. GPCRs form major links in cellular communication/response systems. A complete list of GPCR proteins from Drosophila would therefore be invaluable in developing human therapeutic targets. Not only will the proteins serve as models for human cellular signaling and response, such molecules will also serve as molecular keys in identifying therapeutically important human orthologs.

[0006] G-protein Coupled Receptors

[0007] G-protein coupled receptors (GPCRs) constitute a major class of proteins responsible for transducing a signal within a cell. GPCRs have three structural domains: an amino terminal extracellular domain, a transmembrane domain containing seven transmembrane segments, three extracellular loops, and three intracellular loops, and a carboxy terminal intracellular domain. Upon binding of a ligand to an extracellular portion of a GPCR, a signal is transduced within the cell that results in a change in a biological or physiological property of the cell. GPCRs, along with G-proteins and effectors (intracellular enzymes and channels modulated by G-proteins), are the components of a modular signaling system that connects the state of intracellular second messengers to extracellular inputs.

[0008] GPCR genes and gene-products are potential causative agents of disease (Spiegel et al., J. Clin. Invest. 92:1119-1125 (1993); McKusick et al., J. Med. Genet. 30:1-26 (1993)). Specific defects in the rhodopsin gene and the V2 vasopressin receptor gene have been shown to cause various forms of retinitis pigmentosum (Nathans et al., Annu. Rev. Genet. 26:403-424(1992)), and nephrogenic diabetes insipidus (Holtzman et al., Hum. Mol. Genet. 2:1201-1204 (1993)). These receptors are of critical importance to both the central nervous system and peripheral physiological processes. Evolutionary analyses suggest that the ancestor of these proteins originally developed in concert with complex body plans and nervous systems.

[0009] The GPCR protein superfamily can be divided into five families: Family I, receptors typified by rhodopsin and the β2-adrenergic receptor and currently represented by over 200 unique members (Dohlman et al., Annu. Rev. Biochem. 60:653-688 (1991)); Family II, the parathyroid hormone/calcitonin/secretin receptor family (Juppner et al., Science 254:1024-1026 (1991); Lin et al., Science 254:1022-1024 (1991)); Family III, the metabotropic glutamate receptor family (Nakanishi, Science 258 597:603 (1992)); Family IV, the cAMP receptor family, important in the chemotaxis and development of D. discoideum (Klein et al., Science 241:1467-1472 (1988)); and Family V, the fungal mating pheromone receptors such as STE2 (Kurjan, Annu. Rev. Biochem. 61:1097-1129 (1992)).

[0010] There are also a small number of other proteins, which present seven putative hydrophobic segments and appear to be unrelated to GPCRs; they have not been shown to couple to G-proteins. Drosophila expresses a photoreceptor-specific protein, bride of sevenless (boss), a seven-transmembrane-segment protein, which has been extensively studied and does not show evidence of being a GPCR (Hart et al., Proc. Natl. Acad. Sci. USA 90:5047-5051 (1993)). The gene frizzled (fz) in Drosophila is also thought to be a protein with seven transmembrane segments. Like boss, fz has not been shown to couple to G-proteins (Vinson et al., Nature 338:263-264 (1989)).

[0011] G proteins represent a family of heterotrimeric proteins composed of α, β and γ subunits, that bind guanine nucleotides. These proteins are usually linked to cell surface receptors, e.g., receptors containing seven transmembrane segments. Following ligand binding to the GPCR, a conformational change is transmitted to the G protein, which causes the α-subunit to exchange a bound GDP molecule for a GTP molecule and to dissociate from the βγ-subunits. The GTP-bound form of the α-subunit typically functions as an effector-modulating moiety, leading to the production of second messengers, such as cAMP (e.g., by activation of adenyl cyclase), diacylglycerol or inositol phosphates. Greater than 20 different types of α-subunits are known in humans. These subunits associate with a smaller pool of β and γ subunits. Examples of mammalian G proteins include Gi, Go, Gq, Gs and Gt. G proteins are described extensively in Lodish et al., Molecular Cell Biology, (Scientific American Books Inc., New York, N.Y., 1995), the contents of which are incorporated herein by reference. GPCRs, G proteins and G protein-linked effector and second messenger systems have been reviewed in The G-Protein Linked Receptor Fact Book, Watson et al., eds., Academic Press (1994).

[0012] Dopamine Receptors

[0013] The understanding of the dopaminergic system relevance in brain function and disease developed several decades ago from three diverse observations following drug treatments. These were the observations that dopamine replacement therapy improved Parkinson's disease symptoms, depletion of dopamine and other catecholamines by reserpine caused depression and antipsychotic drugs blocked dopamine receptors. The finding that the dopamine receptor binding affinities of typical antipsychotic drugs correlate with their clinical potency led to the dopamine overactivity hypothesis of schizophrenia (Snyder, S. H., Am J Psychiatry 133, 197-202 (1976); Seeman, P. and Lee, T., Science 188, 1217-9 (1975)). Today, dopamine receptors are crucial targets in the pharmacological therapy of schizophrenia, Parkinson's disease, Tourette's syndrome, tardive dyskinesia and Huntington's disease. The dopaminergic system includes the nigrostriatal, mesocorticolimbic and tuberoinfundibular pathways. The nigrostriatal pathway is part of the striatal motor system and its degeneration leads to Parkinson's disease; the mesocorticolimbic pathway plays a key role in reinforcement and in emotional expression and is the desired site of action of antipsychotic drugs; the tuberoinfundibular pathways regulates prolactin secretion from the pituitary.

[0014] Dopamine receptors are members of the G protein coupled receptor superfamily, a large group proteins that share a seven helical membrane-spanning structure and transduce signals through coupling to heterotrimeric guanine nucleotide-binding regulatory proteins (G proteins). Dopamine receptors are classified into subfamilies: D1-like (D1 and D5) and D2-like (D2, D3 and D4) based on their different ligand binding profiles, signal transduction properties, sequence homologies and genomic organizations (Civelli, O., Bunzow, J. R. and Grandy, D. K., Annu Rev Pharmacol Toxicol 33, 281-307 (1993)). The D1-like receptors, D1 and D5, stimulate cAMP synthesis through coupling with Gs-like proteins and their genes do not contain introns within their protein coding regions. On the other hand, the D2-like receptors, D2, D3 and D4, inhibit cAMP synthesis through their interaction with Gi-like proteins and share a similar genomic organization which includes introns within their protein coding regions.

[0015] Serotonin Receptors

[0016] Serotonin (5-Hydroxytryptamine; 5-HT) was first isolated from blood serum, where it was shown to promote vasoconstriction (Rapport, M. M., Green, A. A. and Page, I. H., J Biol Chem 176, 1243-1251 (1948). Interest on a possible relationship between 5-HT and psychiatric disease was spurred by the observations that hallucinogens such as LSD and psilocybin inhibit the actions of 5-HT on smooth muscle preparations (Gaddum, J. H. and Hameed, K. A., Br J Pharmacol 9, 240-248 (1954)). This observation lead to the hypothesis that brain 5-HT activity might be altered in psychiatric disorders (Wooley, D. W. and Shaw, E., Proc Natl Acad Sci USA 40, 228-231 (1954); Gaddum, J. H. and Picarelli, Z. P., Br J Pharmacol 12, 323-328 (1957)). This hypothesis was strengthened by the introduction of tricyclic antidepressants and monoamine oxidase inhibitors for the treatment of major depression and the observation that those drugs affected noradrenaline and 5-HT metabolism. Today, drugs acting on the serotoninergic system have been proved to be effective in the pharmacotherapy of psychiatric diseases such as depression, schizophrenia, obsessive-compulsive disorder, panic disorder, generalized anxiety disorder and social phobia as well as migraine, vomiting induced by cancer chemotherapy and gastric motility disorders.

[0017] Serotonin receptors represent a very large and diverse family of neurotransmitter receptors. To date thirteen 5-HT receptor proteins coupled to G proteins plus one ligand-gated ion channel receptor (5-HT3) have been described in mammals. This receptor diversity is thought to reflect serotonin's ancient origin as a neurotransmitter and a hormone as well as the many different roles of 5-HT in mammals. The 5-HT receptors have been classified into seven subfamilies or groups according to their different ligand-binding affinity profiles, molecular structure and intracellular transduction mechanisms (Hoyer, D. et al., Pharmacol. Rev. 46, 157-203 (1994)).

[0018] GPCRs are a major target for drug/insecticide action and development. Accordingly, it is valuable to the field of pharmaceutical development to identify and characterize previously unknown GPCRs. The present invention advances the state of the art by providing a previously unidentified drosophila GPCRs.

[0019] Insecticides

[0020] About 10,000 species of the more than 1 million species of insects are crop-eating, and of these, approximately 700 species worldwide cause most of the insect damage to man's crops, in the field and in storage.

[0021] A detailed study of novel proteins from Drosophila and invertebrate orthologs thereof, will serve as targets for identifying new members of the known classes of insecticides as well as aiding in the identification of new classes of compounds.

### SUMMARY OF THE INVENTION

[0022] The present invention is based in part on the identification of nucleic acid sequences that encode amino acid sequences of 66 GPCR proteins that are produced by Drosophila melanogaster and invertebrate, human and other mammalian orthologs thereof. These unique protein sequences, and nucleic acid sequences that encode these proteins, can be used as models for the development of human therapeutic targets, aid in the identification of therapeutic proteins and serve as targets for the development of human therapeutic and insecticidal agents.

[0023] The proteins of the present inventions are GPCRs that participate in signaling pathways. As used herein, a “signaling pathway” refers to the modulation (e.g., stimulation or inhibition) of a cellular function/activity upon the binding of a ligand to the GPCR protein. Examples of such functions include mobilization of intracellular molecules that participate in a signal transduction pathway, e.g., phosphatidylinositol 4,5-bisphosphate (PIP₂), inositol 1,4,5-triphosphate (IP₃) and adenylate cyclase; polarization of the plasma membrane; production or secretion of molecules; alteration in the structure of a cellular component; cell proliferation, e.g., synthesis of DNA; cell migration; cell differentiation; and cell survival

[0024] The response mediated by the receptor protein depends on the type of cell. For example, in some cells, binding of a ligand to the receptor protein may stimulate an activity such as release of compounds, gating of a channel, cellular adhesion, migration, differentiation, etc., through phosphatidylinositol or cyclic AMP metabolism and turnover while in other cells, the binding of the ligand will produce a different result. Regardless of the cellular activity/response modulated by the receptor protein, it is universal that the protein is a GPCR and interacts with G proteins to produce one or more secondary signals, in a variety of intracellular signal transduction pathways, e.g., through phosphatidylinositol or cyclic AMP metabolism and turnover, in a cell.

[0025] As used herein, “phosphatidylinositol turnover and metabolism” refers to the molecules involved in the turnover and metabolism of phosphatidylinositol 4,5-bisphosphate (PIP₂) as well as to the activities of these molecules. PIP₂ is a phospholipid found in the cytosolic leaflet of the plasma membrane. Binding of ligand to the receptor activates, in some cells, the plasma-membrane enzyme phospholipase C that in turn can hydrolyze PIP₂ to produce 1,2-diacylglycerol (DAG) and inositol 1,4,5-triphosphate (IP₃). Once formed IP₃ can diffuse to the endoplasmic reticulum surface where it can bind an IP₃ receptor, e.g., a calcium channel protein containing an IP₃ binding site. IP₃ binding can induce opening of the channel, allowing calcium ions to be released into the cytoplasm. IP₃ can also be phosphorylated by a specific kinase to form inositol 1,3,4,5-tetraphosphate (IP₄), a molecule that can cause calcium entry into the cytoplasm from the extracellular medium. IP₃ and IP₄ can subsequently be hydrolyzed very rapidly to the inactive products inositol 1,4-biphosphate (IP₂) and inositol 1,3,4-triphosphate, respectively. These inactive products can be recycled by the cell to synthesize PIP₂. The other second messenger produced by the hydrolysis of PIP₂, namely 1,2-diacylglycerol (DAG), remains in the cell membrane where it can serve to activate the enzyme protein kinase C. Protein kinase C is usually found soluble in the cytoplasm of the cell, but upon an increase in the intracellular calcium concentration, this enzyme can move to the plasma membrane where it can be activated by DAG. The activation of protein kinase C in different cells results in various cellular responses such as the phosphorylation of glycogen synthase, or the phosphorylation of various transcription factors, e.g., NF-kB. The language “phosphatidylinositol activity”, as used herein, refers to an activity of PIP₂ or one of its metabolites.

[0026] Another signaling pathway in which the receptor may participate is the cAMP turnover pathway. As used herein, “cyclic AMP turnover and metabolism” refers to the molecules involved in the turnover and metabolism of cyclic AMP (cAMP) as well as to the activities of these molecules. Cyclic AMP is a second messenger produced in response to ligand-induced stimulation of certain G protein coupled receptors. In the cAMP signaling pathway, binding of a ligand to a GPCR can lead to the activation of the enzyme adenyl cyclase, which catalyzes the synthesis of cAMP. The newly synthesized cAMP can in turn activate a cAMP-dependent protein kinase. This activated kinase can phosphorylate a voltage-gated potassium channel protein, or an associated protein, and lead to the inability of the potassium channel to open during an action potential. The inability of the potassium channel to open results in a decrease in the outward flow of potassium, which normally repolarizes the membrane of a neuron, leading to prolonged membrane depolarization.

[0027] By targeting an agent to modulate a GPCR, the signaling activity and biological process mediated by the receptor can be agonized or antagonized. Such agonism and antagonism serves as a basis for modulating a biological activity in a therapeutic context (mammalian therapy) or toxic context (anti-invertebrate/insecticidal agent).

### DESCRIPTION OF THE FIGURE SHEETS

[0028] FIGURE SHEETS 1-109 provides genomicnucleic acid sequences from Drosophila melanogaster, predicted transcript, amino acid coding regions, information relating to the subfamily of GPCR proteins to which the protein sequence belongs, e.g., BLAST hit homology, presence of hidden Markov model, etc. Also provided are 5′ promoter sequences, transciption initiation sites and other structural features.

### DETAILED DESCRIPTION OF THE INVENTION

[0029] General Description

[0030] The present invention is based on the sequencing of the Drosophila melanogaster genome. During the sequencing and assembly of the Drosophila melanogaster genome, analysis of the sequence information revealed previously unidentified nucleic acid molecules that encode proteins that share structural and/or sequence homology to protein/peptide/domains identified and characterized within the art as being a GPCR protein or part of a GPCR protein. Based on this analysis, the present invention provides amino acid sequences of 66 GPCR proteins that are produced by Drosophila melanogaster, nucleic acid sequences that encode these GPCR proteins, and the art known protein/peptide/domain that have structural or sequence homology to the Drosophila melanogaster protein.

[0031] In addition to being previously unknown, the proteins and nucleic acid molecules that are provided in the present invention are selected based on their ability to be used for the development of commercially important products and services. Specifically, the present proteins are selected based on homology and/or structural relatedness to known GPCR proteins of commercial importance and/or the presence of genetic signals that define the protein as a GPCR protein. Some of the more specific features of the proteins of the present invention, and the uses thereof, are described in detail below, and are known within the art for each category of GPCR.

[0032] Specific Embodiments

[0033] Peptide Molecules

[0034] In the Figure sheets, the present invention provides nucleic acid sequences that encode 66 protein molecules that have been identified as being within the Drosophila melanogaster genome (SEQ ID NOs: 3, 6, 9, . . . , 192, 195, 198, encoded by nucleic acid molecules provided in SEQ ID NOs: 1, 4, 7, . . . , 190, 193, 196 (genomic sequences) or SEQ ID NOs: 2, 5, 8, . . . , 191, 194, 197 (transcript sequences)). These protein sequences will be referred herein as the GPCR proteins of the present invention, GPCR proteins, or the peptides or the proteins of the present invention. Table 1 provides a summary of the GPCRs of the present invention and the subfamily assignment of each one.

[0035] The present invention provides isolated peptide and protein molecules that consist of, consist essentially of or are comprised of the amino acid sequences of the GPCR proteins disclosed in the Figure sheets (SEQ ID NO: 3, 6, 9, 189, 192, 195, 198, encoded by nucleic acid molecules provided in SEQ ID NOs: 1, 4, 7, . . . , 190, 193, 196 (genomic sequences) or SEQ ID NOs: 2, 5, 8, . . . , 191, 194, 197 (transcript sequences)), as well as all obvious variants of these proteins that are within the art to make and use. Some of these variants are described in detail below.

[0036] As used herein, a protein is said to be “isolated” or “purified” when it is substantially free of cellular material or free of chemical precursors or other chemicals. The proteins of the present invention can be purified to homogeneity or other degrees of purity. The level of purification will be based on the intended use. The critical feature is that the preparation allows for the desired function of the protein, even if in the presence of considerable amounts of other components.

[0037] In some uses, “substantially free of cellular material” includes preparations of the protein having less than about 30% (by dry weight) other proteins (i.e., contaminating protein), less than about 20% other proteins, less than about 10% other proteins, or less than about 5% other proteins. When the protein is recombinantly produced, it can also be substantially free of culture medium, i.e., culture medium represents less than about 20% of the volume of the protein preparation.

[0038] The language “substantially free of chemical precursors or other chemicals” includes preparations of the protein in which it is separated from chemical precursors or other chemicals that are involved in its synthesis. In one embodiment, the language “substantially free of chemical precursors or other chemicals” includes preparations of the GPCR protein having less than about 30% (by dry weight) chemical precursors or other chemicals, less than about 20% chemical precursors or other chemicals, less than about 10% chemical precursors or other chemicals, or less than about 5% chemical precursors or other chemicals.

[0039] The isolated GPCR protein can be purified from cells that naturally express it, purified from cells that have been altered to express it (recombinant), or synthesized using known protein synthesis methods. For example, a nucleic acid molecule encoding the GPCR protein is cloned into an expression vector, the expression vector introduced into a host cell and the protein expressed in the host cell. The protein can then be isolated from the cells by an appropriate purification scheme using standard protein purification techniques. Many of these techniques are described in detail below.

[0040] Accordingly, the present invention provides proteins that consist of one of the amino acid sequences encoded by the nucleic acid sequences shown in the Figure sheets (SEQ ID NOs: 1, 4, 7, . . . , 190, 193, 196 (genomic sequences) or SEQ ID NOs: 2, 5, 8, . . . , 191, 194, 197 (transcript sequences)). The amino acid sequences of such proteins are provided in the Figure Sheets along with an explanation of the protein type/family. A protein consists of an amino acid sequence when the amino acid sequence is the final amino acid sequence of the protein.

[0041] The present invention further provides proteins that consist essentially of one of the amino acid sequences encoded by the nucleic acid sequences shown in the Figure sheets (SEQ ID NOs: 1, 4, 7, . . . , 190, 193, 196 (genomic sequences) or SEQ ID NOs: 2, 5, 8, . . . , 191, 194, 197 (transcript sequences)). A protein consists essentially of an amino acid sequence when such an amino acid sequence is present with only a few additional amino acid residues in the final protein.

[0042] The present invention further provides proteins that are comprised of one of the amino acid sequences encoded by the nucleic acid sequences shown in the Figure sheets (SEQ ID NOs: 1, 4, 7, . . . , 190, 193, 196 (genomic sequences) or SEQ ID NOs: 2, 5, 8, . . . , 191, 194, 197 (transcript sequences)). A protein is comprised of an amino acid sequence when the amino acid sequence is at least part of the final amino acid sequence of the protein. In such a fashion, the protein can be only the protein or have additional amino acid molecules, such as amino acid residues (contiguous encoded sequence) that are naturally associated with it or heterologous amino acid residues/peptide sequences. Such a protein can have a few additional amino acid residues or can comprise several hundred or more additional amino acids. The preferred classes of proteins that are comprised of the GPCR proteins of the present invention are the naturally occurring mature proteins.

[0043] The GPCR proteins of the present invention can be attached to heterologous sequences to form chimeric or fusion proteins. Such chimeric and fusion proteins comprise a GPCR protein operatively linked to a heterologous protein having an amino acid sequence not substantially homologous to the GPCR protein. “Operatively linked” indicates that the GPCR protein and the heterologous protein are fused in-frame. The heterologous protein can be fused to the N-terminus or C-terminus of the GPCR protein.

[0044] In some uses, the fusion protein does not affect the activity of the GPCR protein per se. For example, the fusion protein can include, but is not limited to, enzymatic fusion proteins, for example beta-galactosidase fusions, yeast two-hybrid GAL fusions, poly-His fusions, MYC-tagged, HI-tagged and Ig fusions. Such fusion proteins, particularly poly-His fusions, can facilitate the purification of recombinant GPCR protein. In certain host cells (e.g., mammalian host cells), expression and/or secretion of a protein can be increased by using a heterologous signal sequence.

[0045] A chimeric or fusion protein can be produced by standard recombinant DNA techniques. For example, DNA fragments coding for the different protein sequences are ligated together in-frame in accordance with conventional techniques. In another embodiment, the fusion gene can be synthesized by conventional techniques including automated DNA synthesizers. Alternatively, PCR amplification of gene fragments can be carried out using anchor primers which give rise to complementary overhangs between two consecutive gene fragments which can subsequently be annealed and re-amplified to generate a chimeric gene sequence (see Ausubel et al., Current Protocols in Molecular Biology, 1992). Moreover, many expression vectors are commercially available that already encode a fusion moiety (e.g., a GST protein). A GPCR protein-encoding nucleic acid can be cloned into such an expression vector such that the fusion moiety is linked in-frame to the GPCR protein.

[0046] As mentioned above, the present invention also provides and enables obvious variants of the amino acid sequence of the proteins of the present invention, such as naturally occurring mature forms of the protein, allelic/sequence variants of the proteins, non-naturally occurring recombinantly derived variants of the proteins, and orthologs and paralogs of the proteins. Such variants can readily be generated using art know techniques in the fields of recombinant nucleic acid technology and protein biochemistry. It is understood, however, that variants exclude any amino acid sequences disclosed prior to the invention.

[0047] Such variants can readily be identified/made using molecular techniques and the sequence information disclosed herein. Further, such variants can readily be distinguished from other proteins based on sequence and/or structural homology to the GPCR proteins of the present invention. The degree of homology/identity present will be based primarily on whether the protein is a functional variant or non-functional variant, the amount of divergence present in the paralog family and the evolutionary distance between the orthologs.

[0048] To determine the percent identity of two amino acid sequences or two nucleic acid sequences, the sequences are aligned for optimal comparison purposes (e.g., gaps can be introduced in one or both of a first and a second amino acid or nucleic acid sequence for optimal alignment and non-homologous sequences can be disregarded for comparison purposes). In a preferred embodiment, the length of a reference sequence aligned for comparison purposes is at least 30%, 40%, 50%, 60%, 70%, 80%, or 90% or more of the length of the reference sequence. The amino acid residues or nucleotides at corresponding amino acid positions or nucleotide positions are then compared. When a position in the first sequence is occupied by the same amino acid residue or nucleotide as the corresponding position in the second sequence, then the molecules are identical at that position (as used herein amino acid or nucleic acid “identity” is equivalent to amino acid or nucleic acid “homology”). The percent identity between the two sequences is a function of the number of identical positions shared by the sequences, taking into account the number of gaps, and the length of each gap, which need to be introduced for optimal alignment of the two sequences.

[0049] The comparison of sequences and determination of percent identity and similarity between two sequences can be accomplished using a mathematical algorithm. (Computational Molecular Biology, Lesk, A. M., ed., Oxford University Press, New York, 1988; Biocomputing: Informatics and Genome Projects, Smith, D. W., ed., Academic Press, New York, 1993; Computer Analysis of Sequence Data, Part 1, Griffin, A. M., and Griffin, H. G., eds., Humana Press, New Jersey, 1994; Sequence Analysis in Molecular Biology, von Heinje, G., Academic Press, 1987; and Sequence Analysis Primer, Gribskov, M. and Devereux, J., eds., M Stockton Press, New York, 1991). In a preferred embodiment, the percent identity between two amino acid sequences is determined using the Needleman and Wunsch (J. Mol. Biol. (48):444-453 (1970)) algorithm which has been incorporated into the GAP program in the GCG software package (available at http://www.gcg.com), using either a Blossom 62 matrix or a PAM250 matrix, and a gap weight of 16, 14, 12, 10, 8, 6, or 4 and a length weight of 1, 2, 3, 4, 5, or 6. In yet another preferred embodiment, the percent identity between two nucleotide sequences is determined using the GAP program in the GCG software package (Devereux, J., et al., Nucleic Acids Res. 12(1):387 (1984)) (available at http://www.gcg.com), using a NWSgapdna.CMP matrix and a gap weight of 40, 50, 60, 70, or 80 and a length weight of 1, 2, 3, 4, 5, or 6. In another embodiment, the percent identity between two amino acid or nucleotide sequences is determined using the algorithm of E. Meyers and W. Miller (CABIOS, 4:11-17 (1989)) which has been incorporated into the ALIGN program (version 2.0), using a PAM120 weight residue table, a gap length penalty of 12 and a gap penalty of 4.

[0050] The nucleic acid and protein sequences of the present invention can further be used as a “query sequence” to perform a search against sequence databases to, for example, identify other family members or related sequences. Such searches can be performed using the NBLAST and XBLAST programs (version 2.0) of Altschul, et al. (J. Mol. Biol. 215:403-10 (1990)). BLAST nucleotide searches can be performed with the NBLAST program, score=100, wordlength=12 to obtain nucleotide sequences homologous to the nucleic acid molecules of the invention. BLAST protein searches can be performed with the XBLAST program, score=50, wordlength=3 to obtain amino acid sequences homologous to the proteins of the invention. To obtain gapped alignments for comparison purposes, Gapped BLAST can be utilized as described in Altschul et al. (Nucleic Acids Res. 25(17):3389-3402 (1997)). When utilizing BLAST and gapped BLAST programs, the default parameters of the respective programs (e.g., XBLAST and NBLAST) can be used. See http://www.ncbi.nlm.nih.gov.

[0051] Full-length pre-processed forms, as well as mature processed forms, of proteins that comprise one of the proteins of the present invention can readily be identified as having complete sequence identity to one of the GPCR proteins of the present invention as well as being encoded by the same genetic locus as the GPCR protein provided herein.

[0052] Allelic variants of a GPCR protein can readily be identified as having a high degree (significant) of sequence homology/identity to at least a portion of the GPCR protein as well as being encoded by the same genetic locus as the GPCR protein provided herein. As used herein, two proteins (or a region of the proteins) have significant homology when the amino acid sequences are typically at least about 70-75%, 80-85%, and more typically at least about 90-95% or more homologous. A significantly homologous amino acid sequence, according to the present invention, will be encoded by a nucleic acid sequence that will hybridize to a GPCR protein encoding nucleic acid molecule under stringent conditions as more fully described below.

[0053] Paralogs of a GPCR protein can readily be identified as having some degree of significant sequence homology/identity to at least a portion of the GPCR protein, as being encoded by a gene from Drosophila, and as having similar activity or function. Two proteins will typically be considered paralogs when the amino acid sequences are typically at least about 70-75%, 80-85%, and more typically at least about 90-95% or more homologous through a given region or domain. Such paralogs will be encoded by a nucleic acid sequence that will hybridize to a GPCR protein encoding nucleic acid molecule under stringent conditions as more fully described below.

[0054] Orthologs of a GPCR protein can readily be identified as having some degree of significant sequence homology/identity to at least a portion of the GPCR protein as well as being encoded by a gene from another organism. Preferred orthologs will be isolated from mammals, preferably human, for the development of human therapeutic targets and agents, or other invertebrates, particularly insects of economica/agriculture importance, e.g. members of the Lepidopteran and Coleopteran orders, for the development of insecticides and insecticidal targets. Such orthologs will be encoded by a nucleic acid sequence that will hybridize to a GPCR protein encoding nucleic acid molecule under moderate to stringent conditions, as more fully described below, depending on the degree of relatedness of the two organisms yielding the proteins.

[0055] Non-naturally occurring variants of the GPCR proteins of the present invention can readily be generated using recombinant techniques. Such variants include, but are not limited to deletions, additions and substitutions in the amino acid sequence of the GPCR protein. For example, one class of substitutions are conserved amino acid substitution. Such substitutions are those that substitute a given amino acid in a GPCR protein by another amino acid of like characteristics. Typically seen as conservative substitutions are the replacements, one for another, among the aliphatic amino acids Ala, Val, Leu, and Ile; interchange of the hydroxyl residues Ser and Thr, exchange of the acidic residues Asp and Glu, substitution between the amide residues Asn and Gln, exchange of the basic residues Lys and Arg and replacements among the aromatic residues Phe, Tyr. Guidance concerning which amino acid changes are likely to be phenotypically silent are found in Bowie et al., Science 247:1306-1310 (1990).

[0056] Variant GPCR proteins can be fully functional or can lack function in one or more activities, e.g. ability to bind ligand, ability to bind G-protein, ability to mediate signaling, etc. Fully functional variants typically contain only conservative variation or variation in non-critical residues or in non-critical regions. Functional variants can also contain substitution of similar amino acids that result in no change or an insignificant change in function. Alternatively, such substitutions may positively or negatively affect function to some degree.

[0057] Non-functional variants typically contain one or more non-conservative amino acid substitutions, deletions, insertions, inversions, or truncation or a substitution, insertion, inversion, or deletion in a critical residue or critical region.

[0058] Amino acids that are essential for function can be identified by methods known in the art, such as site-directed mutagenesis or alanine-scanning mutagenesis (Cunningham et al., Science 244:1081-1085 (1989)). The latter procedure introduces single alanine mutations at every residue in the molecule. The resulting mutant molecules are then tested for biological activity such as receptor binding or in assays such as an in vitro proliferative activity. Sites that are critical for ligand-receptor binding can also be determined by structural analysis such as crystallization, nuclear magnetic resonance or photoaffinity labeling (Smith et al., J. Mol. Biol. 224:899-904 (1992); de Vos et al. Science 255:306-312 (1992)).

[0059] Polypeptides often contain amino acids other than the 20 amino acids commonly referred to as the 20 naturally-occurring amino acids. Further, many amino acids, including the terminal amino acids, may be modified by natural processes, such as processing and other post-translational modifications, or by chemical modification techniques well known in the art. Common modifications that occur naturally in polypeptides are described in basic texts, detailed monographs, and the research literature, and they are well known to those of skill in the art.

[0060] Accordingly, the polypeptides also encompass derivatives or analogs in which a substituted amino acid residue is not one encoded by the genetic code, in which a substituent group is included, in which the mature polypeptide is fused with another compound, such as a compound to increase the half-life of the polypeptide (for example, polyethylene glycol), or in which the additional amino acids are fused to the mature polypeptide, such as a leader or secretory sequence or a sequence for purification of the mature polypeptide or a pro-protein sequence.

[0061] The present invention further provides fragments of the GPCR proteins, in addition to proteins and peptides that comprise and consist of such fragments. The fragments to which the invention pertains, however, are not to be construed as encompassing fragments that may be disclosed publicly prior to the present invention.

[0062] As used herein, a fragment comprises at least 8 or more contiguous amino acid residues from a GPCR protein. Such fragments can be chosen based on the ability to retain one or more of the biological activities of the GPCR protein or could be chosen for the ability to perform a function, e.g. act as an immunogen. Particularly important fragments are biologically active fragments, peptides which are, for example, about 8 or more amino acids in length. Such fragments will typically comprise a domain or motif of the GPCR protein, e.g., active site, a G-protein binding site, a transmembrane domain or a ligand binding domain. Further, possible fragments include, but are not limited to, domain or motif containing fragments, soluble peptide fragments, and fragments containing immunogenic structures. Predicted domains and functional sites are readily identifiable by computer programs well-known and readily available to those of skill in the art (e.g., PROSITE analysis).

[0063] Polypeptides often contain amino acids other than the 20 amino acids commonly referred to as the 20 naturally-occurring amino acids. Further, many amino acids, including the terminal amino acids, may be modified by natural processes, such as processing and other post-translational modifications, or by chemical modification techniques well known in the art. Common modifications that occur naturally in GPCR proteins are described in basic texts, detailed monographs, and the research literature, and they are well known to those of skill in the art.

[0064] Accordingly, the GPCR proteins of the present invention also encompass derivatives or analogs in which a substituted amino acid residue is not one encoded by the genetic code, in which a substituent group is included, in which the mature GPCR protein is fused with another compound, such as a compound to increase the half-life of the GPCR protein (for example, polyethylene glycol), or in which the additional amino acids are fused to the mature GPCR protein, such as a leader or secretory sequence or a sequence for purification of the mature GPCR protein or a pro-protein sequence.

[0065] Known modifications include, but are not limited to, acetylation, acylation, ADP-ribosylation, amidation, covalent attachment of flavin, covalent attachment of a heme moiety, covalent attachment of a nucleotide or nucleotide derivative, covalent attachment of a lipid or lipid derivative, covalent attachment of phosphotidylinositol, cross-linking, cyclization, disulfide bond formation, demethylation, formation of covalent crosslinks, formation of cystine, formation of pyroglutamate, formylation, gamma carboxylation, glycosylation, GPI anchor formation, hydroxylation, iodination, methylation, myristoylation, oxidation, proteolytic processing, phosphorylation, prenylation, racemization, selenoylation, sulfation, transfer-RNA mediated addition of amino acids to proteins such as arginylation, and ubiquitination.

[0066] Such modifications are well-known to those of skill in the art and have been described in great detail in the scientific literature. Several particularly common modifications, glycosylation, lipid attachment, sulfation, gamma-carboxylation of glutamic acid residues, hydroxylation and ADP-ribosylation, for instance, are described in most basic texts, such as Proteins—Structure and Molecular Properties, 2nd Ed., T. E. Creighton, W. H. Freeman and Company, New York (1993). Many detailed reviews are available on this subject, such as by Wold, F., Posttranslational Covalent Modification of Proteins, B. C. Johnson, Ed., Academic Press, New York 1-12 (1983); Seifter et al. (Meth. Enzymol. 182: 626-646 (1990)) and Rattan et al. (Ann. N.Y. Acad. Sci. 663:48-62 (1992)).

[0067] Protein/Peptide Uses

[0068] The proteins of the present invention can be used in assays to identify modulators as potential insecticides, to determine the biological activity of the protein, including in a panel of multiple proteins for high-throughput screening; to raise antibodies or to elicit another immune response; as a reagent (including the labeled reagent) in assays designed to quantitatively determine levels of the protein (or its binding partner or receptor) in biological fluids; and as markers for tissues in which the corresponding protein is preferentially expressed. Where the protein binds or potentially binds to another protein (such as, for example, in a receptor-ligand interaction), the protein can be used to identify the binding partner so as to develop a system to identify inhibitors of the binding interaction. Any or all of these research utilities are capable of being developed into reagent grade or kit format for commercialization as research products.

[0069] Methods for performing the uses listed above are well known to those skilled in the art. References disclosing such methods include “Molecular Cloning: A Laboratory Manual”, 2d ed., Cold Spring Harbor Laboratory Press, Sambrook, J., E. F. Fritsch and T. Maniatis eds., 1989, and “Methods in Enzymology: Guide to Molecular Cloning Techniques”, Academic Press, Berger, S. L. and A. R. Kimmel eds., 1987 and can readily be determined using the information provided in Table 1.

[0070] The potential uses of the proteins of the present invention are based primarily on the source of the protein as well as the class/action of the protein. For example, GPCRs isolated from Drosophila and other invertebrates serve as a target for identifying anti-invertebrate compounds, e.g. insecticides. GPCRs isolated from Drosophila and their human/mammalian orthologs serve as targets for identifying agents for use in mammalian therapeutic applications, e.g. a human drug. Approximately 70% of all pharmaceutical agents modulate the activity of a GPCR. A combination of the invertebrate and mammalian ortholog can be used in selective screening methods to find agents specific for invertebrates. Table 1 provides specific context of use for each of the presently disclosed GPCRs. Particularly useful are GPCRs involved in neurotransmission for use as insecticide targets.

[0071] The receptor polypeptides (including variants and fragments which may have been disclosed prior to the present invention) are useful for biological assays related to GPCRs. Such assays involve any of the known GPCR functions or activities or properties useful for diagnosis and treatment of GPCR-related conditions.

[0072] The receptor polypeptides are also useful in drug/insecticide screening assays, in cell-based or cell-free systems. Cell-based systems can be native, i.e., cells that normally express the receptor protein, as a biopsy or expanded in cell culture. In one embodiment, however, cell-based assays involve recombinant host cells expressing the receptor protein.

[0073] The polypeptides can be used to identify compounds that modulate receptor activity. Both the GPCRs of the present invention and appropriate variants and fragments can be used in high-throughput screens to assay candidate compounds for the ability to bind to the receptor. These compounds can be further screened against a functional receptor to determine the effect of the compound on the receptor activity. Further, these compounds can be tested in animal or invertebrate systems to determine activity/effectiveness. Compounds can be identified that activate (agonist) or inactivate (antagonist) the receptor to a desired degree.

[0074] Further, the receptor polypeptides can be used to screen a compound for the ability to stimulate or inhibit interaction between the receptor protein and a target molecule that normally interacts with the receptor protein. The target can be ligand or a component of the signal pathway that the receptor protein normally interacts (for example, a G-protein or other interactor involved in cAMP or phosphatidylinositol turnover and/or adenylate cyclase, or phospholipase C activation). Such assays typically include the steps of combining the receptor protein with a candidate compound under conditions that allow the receptor protein, or fragment, to interact with the target molecule, and to detect the formation of a complex between the protein and the target or to detect the biochemical consequence of the interaction with the receptor protein and the target, such as any of the associated effects of signal transduction such as G-protein phosphorylation, cAMP or phosphatidylinositol turnover, and adenylate cyclase or phospholipase C activation.

[0075] Candidate compounds include, for example, 1) peptides such as soluble peptides, including Ig-tailed fusion peptides and members of random peptide libraries (see, e.g., Lam et al., Nature 354:82-84 (1991); Houghten et al., Nature 354:84-86 (1991)) and combinatorial chemistry-derived molecular libraries made of D- and/or L-configuration amino acids; 2) phosphopeptides (e.g., members of random and partially degenerate, directed phosphopeptide libraries, see, e.g., Songyang et al., Cell 72:767-778 (1993)); 3) antibodies (e.g., polyclonal, monoclonal, humanized, anti-idiotypic, chimeric, and single chain antibodies as well as Fab, F(ab′)₂, Fab expression library fragments, and epitope-binding fragments of antibodies); and 4) small organic and inorganic molecules (e.g., molecules obtained from combinatorial and natural product libraries).

[0076] One candidate compound is a soluble fragment of the receptor that competes for ligand binding. Other candidate compounds include mutant receptors or appropriate fragments containing mutations that affect receptor function and thus compete for ligand. Accordingly, a fragment that competes for ligand, for example with a higher affinity, or a fragment that binds ligand but does not allow release, is encompassed by the invention.

[0077] The invention further includes other end point assays to identify compounds that modulate (stimulate or inhibit) receptor activity. The assays typically involve an assay of events in the signal transduction pathway that indicate receptor activity. Thus, the expression of genes that are up- or down-regulated in response to the receptor protein dependent signal cascade can be assayed. In one embodiment, the regulatory region of such genes can be operably linked to a marker that is easily detectable, such as luciferase. Alternatively, phosphorylation of the receptor protein, or a receptor protein target, could also be measured.

[0078] Any of the biological or biochemical functions mediated by the receptor can be used as an endpoint assay. These include all of the biochemical or biochemical/biological events described herein, in the references cited herein, incorporated by reference for these endpoint assay targets, and other functions known to those of ordinary skill in the art.

[0079] Binding and/or activating compounds can also be screened by using chimeric receptor proteins in which the amino terminal extracellular domain, or parts thereof, the entire transmembrane domain or subregions, such as any of the seven transmembrane segments or any of the intracellular or extracellular loops and the carboxy terminal intracellular domain, or parts thereof, can be replaced by heterologous domains or subregions. For example, a G-protein-binding region can be used that interacts with a different G-protein then that which is recognized by the native receptor. Accordingly, a different set of signal transduction components is available as an end-point assay for activation. Alternatively, the entire transmembrane portion or subregions (such as transmembrane segments or intracellular or extracellular loops) can be replaced with the entire transmembrane portion or subregions specific to a host cell that is different from the host cell from which the amino terminal extracellular domain and/or the G-protein-binding region are derived. This allows for assays to be performed in other than the specific host cell from which the receptor is derived. Alternatively, the amino terminal extracellular domain (and/or other ligand-binding regions) could be replaced by a domain (and/or other binding region) binding a different ligand, thus, providing an assay for test compounds that interact with the heterologous amino terminal extracellular domain (or region) but still cause signal transduction. Finally, activation can be detected by a reporter gene containing an easily detectable coding region operably linked to a transcriptional regulatory sequence that is part of the native signal transduction pathway.

[0080] The receptor polypeptides are also useful in competition binding assays in methods designed to discover compounds that interact with the receptor. Thus, a compound is exposed to a receptor polypeptide under conditions that allow the compound to bind or to otherwise interact with the polypeptide. Soluble receptor polypeptide is also added to the mixture. If the test compound interacts with the soluble receptor polypeptide, it decreases the amount of complex formed or activity from the receptor target. This type of assay is particularly useful in cases in which compounds are sought that interact with specific regions of the receptor. Thus, the soluble polypeptide that competes with the target receptor region is designed to contain peptide sequences corresponding to the region of interest.

[0081] To perform cell free drug/insecticide screening assays, it is sometimes desirable to immobilize either the receptor protein, or fragment, or its target molecule to facilitate separation of complexes from uncomplexed forms of one or both of the proteins, as well as to accommodate automation of the assay.

[0082] Techniques for immobilizing proteins on matrices can be used in the drug/insecticide screening assays. In one embodiment, a fusion protein can be provided which adds a domain that allows the protein to be bound to a matrix. For example, glutathione-S-transferase/15625 fusion proteins can be adsorbed onto glutathione sepharose beads (Sigma Chemical, St. Louis, Mo.) or glutathione derivatized microtitre plates, which are then combined with the cell lysates (e.g., ³⁵S-labeled) and the candidate compound, and the mixture incubated under conditions conducive to complex formation (e.g., at physiological conditions for salt and pH). Following incubation, the beads are washed to remove any unbound label, and the matrix immobilized and radiolabel determined directly, or in the supernatant after the complexes are dissociated. Alternatively, the complexes can be dissociated from the matrix, separated by SDS-PAGE, and the level of receptor-binding protein found in the bead fraction quantitated from the gel using standard electrophoretic techniques. For example, either the polypeptide or its target molecule can be immobilized utilizing conjugation of biotin and streptavidin using techniques well known in the art. Alternatively, antibodies reactive with the protein but which do not interfere with binding of the protein to its target molecule can be derivatized to the wells of the plate, and the protein trapped in the wells by antibody conjugation. Preparations of a receptor-binding protein and a candidate compound are incubated in the receptor protein-presenting wells and the amount of complex trapped in the well can be quantitated. Methods for detecting such complexes, in addition to those described above for the GST-immobilized complexes, include immunodetection of complexes using antibodies reactive with the receptor protein target molecule, or which are reactive with receptor protein and compete with the target molecule, as well as enzyme-linked assays which rely on detecting an enzymatic activity associated with the target molecule.

[0083] Agents that modulate one of the GPCRs of the present invention can be identified using one or more of the above assays, alone or in combination. It is generally preferable to use a cell-based or cell free system first and then confirm activity in an animal/insect model system. Such model systems are well known in the art and can readily be employed in this context.

[0084] Modulators of receptor protein activity identified according to these drug/insecticide screening assays can be used to treat a subject with a disorder mediated by the receptor pathway, by treating cells that express the GPCR. These methods of treatment include the steps of administering the modulators of protein activity in a pharmaceutical composition as described herein, to a subject in need of such treatment.

[0085] In yet another aspect of the invention, the GPCR proteins can be used as “bait proteins” in a two-hybrid assay or three-hybrid assay (see, e.g., U.S. Pat. No. 5,283,317; Zervos et al. (1993) Cell 72:223-232; Madura et al. (1993) J. Biol. Chem. 268:12046-12054; Bartel et al. (1993) Biotechniques 14:920-924; Iwabuchi et al. (1993) Oncogene 8:1693-1696; and Brent WO94/10300), to identify other proteins, which bind to or interact with the GPCR and are involved in GPCR activity. Such GPCR-binding proteins are also likely to be involved in the propagation of signals by the GPCR proteins or GPCR targets as, for example, downstream elements of a GPCR-mediated signaling pathway, e.g., a signaling pathway. Alternatively, such GPCR-binding proteins are likely to be GPCR inhibitors.

[0086] The two-hybrid system is based on the modular nature of most transcription factors, which consist of separable DNA-binding and activation domains. Briefly, the assay utilizes two different DNA constructs. In one construct, the gene that codes for a GPCR protein is fused to a gene encoding the DNA binding domain of a known transcription factor (e.g., GAL-4). In the other construct, a DNA sequence, from a library of DNA sequences, that encodes an unidentified protein (“prey” or “sample”) is fused to a gene that codes for the activation domain of the known transcription factor. If the “bait” and the “prey” proteins are able to interact, in vivo, forming a GPCR-dependent complex, the DNA-binding and activation domains of the transcription factor are brought into close proximity. This proximity allows transcription of a reporter gene (e.g., LacZ) which is operably linked to a transcriptional regulatory site responsive to the transcription factor. Expression of the reporter gene can be detected and cell colonies containing the functional transcription factor can be isolated and used to obtain the cloned gene which encodes the protein which interacts with the GPCR protein.

[0087] This invention further pertains to novel agents identified by the above-described screening assays. Accordingly, it is within the scope of this invention to further use an agent identified as described herein in an appropriate animal model. For example, an agent identified as described herein (e.g., a GPCR modulating agent, an antisense GPCR nucleic acid molecule, a GPCR-specific antibody, or a GPCR-binding partner) can be used in an animal or insect model to determine the efficacy, toxicity, or side effects of treatment with such an agent. Alternatively, an agent identified as described herein can be used in an animal or insect model to determine the mechanism of action of such an agent. Furthermore, this invention pertains to uses of novel agents identified by the above-described screening assays for insecticidal activity as described herein.

[0088] Antibodies

[0089] The invention also provides antibodies that selectively bind to one of the proteins of the present invention, a protein comprising such a peptide, as well as variants and fragments thereof. As used herein, an antibody selectively binds a target peptide when it binds the target peptide and does not significantly bind to unrelated proteins. An antibody is still considered to selectively bind a peptide even if it also binds to other proteins that are not substantially homologous with the target peptide so long as such proteins share homology with a fragment or domain of the peptide target of the antibody. In this case, it would be understood that antibody binding to the peptide is still selective despite some degree of cross-reactivity.

[0090] As used herein, an antibody is defined in terms consistent with that recognized within the art: they are multi-subunit proteins produced by a mammalian organism in response to an antigen challenge. The antibodies of the present invention include polyclonal antibodies and monoclonal antibodies, as well as fragments of such antibodies, including, but not limited to, Fab or F(ab′)₂, and Fv fragments.

[0091] Many methods are known for generating and/or identifying antibodies to a given target peptide. Several such methods are described by Harlow, Antibodies, Cold Spring Harbor Press, (1989).

[0092] In general, to generate antibodies, an isolated peptide is used as an immunogen and is administered to a mammalian organism, such as a rat, rabbit or mouse. Either the full-length protein, an antigenic peptide fragment or a fusion-protein can be used.

[0093] Antibodies are preferably prepared from regions or discrete fragments of the GPCR proteins. Antibodies can be prepared from any region of the protein as described herein. However, preferred regions will include those involved in function/activity and/or receptor/binding partner interaction.

[0094] An antigenic fragment will typically comprise at least 10 contiguous amino acid residues. The antigenic peptide can comprise, however; at least 12, 14, 20 or more amino acid residues. Such fragments can be selected on a physical property, such as fragments correspond to regions that are located on the surface of the protein, e.g., hydrophilic regions or can be selected based on sequence uniqueness.

[0095] Detection on an antibody of the present invention can be facilitated by coupling (i.e., physically linking) the antibody to a detectable substance. Examples of detectable substances include various enzymes, prosthetic groups, fluorescent materials, luminescent materials, bioluminescent materials, and radioactive materials. Examples of suitable enzymes include horseradish peroxidase, alkaline phosphatase, β-galactosidase, or acetylcholinesterase; examples of suitable prosthetic group complexes include streptavidin/biotin and avidin/biotin; examples of suitable fluorescent materials include umbelliferone, fluorescein, fluorescein isothiocyanate, rhodamine, dichlorotriazinylamine fluorescein, dansyl chloride or phycoerythrin; an example of a luminescent material includes luminol; examples of bioluminescent materials include luciferase, luciferin, and aequorin, and examples of suitable radioactive material include ¹²⁵I, ¹³¹I, ³⁵S or ³H.

[0096] Antibody Uses

[0097] The antibodies can be used to isolate one of the proteins of the present invention by standard techniques, such as affinity chromatography or immunoprecipitation. The antibodies can facilitate the purification of the natural protein from cells and recombinantly produced protein expressed in host cells. In addition, such antibodies are useful to detect the presence of one of the proteins of the present invention in cells or tissues to determine the pattern of expression of the protein among various tissues in an organism and over the course of normal development. Further, such antibodies can be used to detect protein in situ, in vitro, or in a cell lysate or supernatant in order to evaluate the abundance and pattern of expression. Also, such antibodies can be used to assess abnormal tissue distribution or abnormal expression during development. Antibody detection of circulating fragments of the full length protein can be used to identify turnover.

[0098] The antibodies can also be used to assess normal and aberrant subcellular localization of cells in the various tissues in an organism. The diagnostic uses can be applied, not only in genetic testing, but also in monitoring a treatment modality. Accordingly, where treatment is ultimately aimed at correcting expression level or the presence of aberrant sequence and aberrant tissue distribution or developmental expression, antibodies directed against the or relevant fragments can be used to monitor therapeutic efficacy.

[0099] The antibodies are also useful for inhibiting protein function, for example, blocking the binding of the GPCR protein to a binding partner such as a ligand. An antibody can be used, for example, to block binding, thus modulating (agonizing or antagonizing) the peptides activity. Antibodies can be prepared against specific fragments containing sites required for function or against intact protein that is associated with a cell or cell membrane.

[0100] The invention also encompasses kits for using antibodies to detect the presence of a protein in a biological sample. The kit can comprise antibodies such as a labeled or labelable antibody and a compound or agent for detecting protein in a biological sample; means for determining the amount of protein in the sample; means for comparing the amount of protein in the sample with a standard; and instructions for use.

[0101] Nucleic Acid Molecules

[0102] The present invention further provides isolated nucleic acid molecules that encode a GPCR protein or protein of the present invention (SEQ ID NO: 3, 6, 9, . . . , 192, 195, 198, encoded by nucleic acid molecules provided in SEQ ID NOs: 1, 4, 7, . . . , 190, 193, 196 (genomic sequences) or SEQ ID NOs: 2, 5, 8, . . . , 191, 194, 197 (transcript sequences)). Such nucleic acid molecules will consist of, consist essentially of, or comprise a nucleotide sequence that encodes one of the GPCR proteins of the present invention, an allelic variant thereof, or an ortholog or paralog thereof.

[0103] As used herein, an “isolated” nucleic acid molecule is one that is separated from other nucleic acid present in the natural source of the nucleic acid. Preferably, an “isolated” nucleic acid is free of sequences which naturally flank the nucleic acid (i.e., sequences located at the 5′ and 3′ ends of the nucleic acid) in the genomic DNA of the organism from which the nucleic acid is derived. However, there can be some flanking nucleotide sequences, for example up to about 5 KB, 4 KB, 3 KB, 2 KB, or 1 KB or less, particularly contiguous protein encoding sequences and protein encoding sequences within the same gene but separated by introns in the genomic sequence. The important point is that the nucleic acid is isolated from remote and unimportant flanking sequences such that it can be subjected to the specific manipulations described herein such as recombinant expression, preparation of probes and primers, and other uses specific to the nucleic acid sequences.

[0104] Moreover, an “isolated” nucleic acid molecule, such as a cDNA molecule, can be substantially free of other cellular material, or culture medium when produced by recombinant techniques, or chemical precursors or other chemicals when chemically synthesized. However, the nucleic acid molecule can be fused to other coding or regulatory sequences and still be considered isolated.

[0105] For example, recombinant DNA molecules contained in a vector are considered isolated. Further examples of isolated DNA molecules include recombinant DNA molecules maintained in heterologous host cells or purified (partially or substantially) DNA molecules in solution. Isolated RNA molecules include in vivo or in vitro RNA transcripts of the isolated DNA molecules of the present invention. Isolated nucleic acid molecules according to the present invention further include such molecules produced synthetically.

[0106] Accordingly, the present invention provides nucleic acid molecules that consist of one of the nucleotide sequences shown in the Figure sheets (SEQ ID NOs: 1, 4, 7, . . . , 190, 193, 196 (genomic sequences) or SEQ ID NOs: 2, 5, 8, . . . , 191, 194, 197 (transcript sequences)). A nucleic acid molecule consists of a nucleotide sequence when the nucleotide sequence is the complete nucleotide sequence of the nucleic acid molecule.

[0107] The present invention further provides nucleic acid molecules that consist essentially of one of the nucleotide sequences shown in the Figure sheets (SEQ ID NOs: 1, 4, 7, . . . , 190, 193, 196 (genomic sequences) or SEQ ID NOs: 2, 5, 8, . . . , 191, 194, 197 (transcript sequences)). A nucleic acid molecule consists essentially of a nucleotide sequence when such a nucleotide sequence is present with only a few additional nucleic acid residues in the final nucleic acid molecule.

[0108] The present invention further provides nucleic acid molecules that are comprised of one of the nucleotide sequences shown in the Figure sheets (SEQ ID NOs: 1, 4, 7, . . . , 190, 193, 196 (genomic sequences) or SEQ ID NOs: 2, 5, 8, . . . , 191, 194, 197 (transcript sequences)). A nucleic acid molecule is comprised of a nucleotide sequence when the nucleotide sequence is at least part of the final nucleotide sequence of the nucleic acid molecule. In such a fashion, the nucleic acid molecule can be only the nucleotide sequence or have additional nucleic acid residues, such as nucleic acid residues that are naturally associated with it or heterologous nucleotide sequences. Such a nucleic acid molecule can have a few additional nucleotides or can comprises several hundred or more additional nucleotides. The preferred classes of nucleic acid molecules that are comprised of the nucleotide sequences of the present are the naturally occurring full-length cDNA molecules and genes and genomic clones since some of the nucleic acid molecules provided in the Figure sheets are fragments of the complete gene that exists in nature. A brief description of how various types of these nucleic acid molecules can be readily made/isolated is provided below.

[0109] In the Figures, both coding and non-coding sequences are provided for each protein encoding nucleic acid sequence. Because of the source of the present invention, Drosophila genomic sequences, the nucleic acid molecules in the figures will contain genomic intronic sequences, 5′ and 3′ non-coding sequences, gene regulatory regions and non-coding intergenic sequences. In general such sequence features are either noted or can readily be identified using computational tools known in the art. As discussed below, some of the non-coding regions, particularly gene regulatory elements such as promoters, are useful for a variety of purposes, e.g. control of heterologous gene expression, target for identifying gene activity modulating compounds.

[0110] Full-length genes may be cloned from known sequence using any one of a number of methods known in the art. For example, a method which employs XL-PCR (Perkin-Elmer, Foster City, Calif.) to amplify long pieces of DNA may be used. Other methods for obtaining full-length sequences are well known in the art.

[0111] The isolated nucleic acid molecules can encode the mature protein plus additional amino or carboxyl-terminal amino acids, or amino acids interior to the mature protein (when the mature form has more than one protein chain, for instance). Such sequences may play a role in processing of a protein from precursor to a mature form, facilitate protein trafficking, prolong or shorten protein half-life or facilitate manipulation of a protein for assay or production, among other things. As generally is the case in situ, the additional amino acids may be processed away from the mature protein by cellular enzymes.

[0112] As mentioned above, the isolated nucleic acid molecules include, but are not limited to, the sequence encoding the GPCR protein alone, the sequence encoding the mature protein and additional coding sequences, such as a leader or secretory sequence (e.g., a pre-pro or pro-protein sequence), the sequence encoding the mature protein, with or without the additional coding sequences, plus additional non-coding sequences, for example introns and non-coding 5′ and 3′ sequences such as transcribed but non-translated sequences that play a role in transcription, mRNA processing (including splicing and polyadenylation signals), ribosome binding and stability of mRNA. In addition, the nucleic acid molecule may be fused to a marker sequence encoding, for example, a protein that facilitates purification.

[0113] Isolated nucleic acid molecules can be in the form of RNA, such as mRNA, or in the form DNA, including cDNA and genomic DNA obtained by cloning or produced by chemical synthetic techniques or by a combination thereof. The nucleic acid, especially DNA, can be double-stranded or single-stranded. Single-stranded nucleic acid can be the coding strand (sense strand) or the non-coding strand (anti-sense strand).

[0114] The invention further provides nucleic acid molecules that encode fragments of the proteins of the present invention as well as nucleic acid molecules that encode obvious variants of the GPCR proteins of the present invention that are described above. Such nucleic acid molecules may be naturally occurring, such as allelic variants (same locus), paralogs (different locus), and orthologs (different organism), or may be constructed by recombinant DNA methods or by chemical synthesis. Such non-naturally occurring variants may be made by mutagenesis techniques, including those applied to nucleic acid molecules, cells, or organisms. Accordingly, as discussed above, the variants can contain nucleotide substitutions, deletions, inversions and insertions. Variation can occur in either or both the coding and non-coding regions. The variations can produce both conservative and non-conservative amino acid substitutions.

[0115] The present invention further provides non-coding fragments of the nucleic acid molecules provided in the Figures. Preferred non-coding fragments include, but are not limited to, promoter sequences, enhancer sequences, gene modulating sequences and gene termination sequences. Such fragments are useful in controlling heterologous gene expression and in developing screens to identify gene modulating agents. Particularly useful are fragments from about 100 to about 1,000 nucleotides taken 5′ from the start ATG in the genomic sequences provided in the Figures (SEQ ID NOs: 1, 4, 7, . . . , 190, 193, 196,).

[0116] A fragment comprises a contiguous nucleotide sequence greater than 12 or more nucleotides. Further, a fragment could at least 30, 40, 50, 100, 250 or 500 nucleotides in length. The length of the fragment will be based on its intended use. For example, the fragment can encode epitope bearing regions of the protein, or can be useful as DNA probes and primers. Such fragments can be isolated using the known nucleotide sequence to synthesize an oligonucleotide probe. A labeled probe can then be used to screen a cDNA library, genomic DNA library, or mRNA to isolate nucleic acid corresponding to the coding region. Further, primers can be used in PCR reactions to clone specific regions of gene.

[0117] A probe/primer typically comprises substantially a purified oligonucleotide or oligonucleotide pair. The oligonucleotide typically comprises a region of nucleotide sequence that hybridizes under stringent conditions to at least about 12, 20, 25, 40, 50 or more consecutive nucleotides.

[0118] Orthologs, homologs, and allelic variants can be identified using methods well known in the art. As described in the protein Section, these variants comprise a nucleotide sequence encoding a protein that is typically 60-65%, 70-75%, 80-85%, and more typically at least about 90-95% or more homologous to the nucleotide sequence shown in the Figure sheets or a fragment of this sequence. Such nucleic acid molecules can readily be identified as being able to hybridize under moderate to stringent conditions, to the nucleotide sequence shown in the Figure sheets or a fragment of the sequence.

[0119] As used herein, the term “hybridizes under stringent conditions” is intended to describe conditions for hybridization and washing under which nucleotide sequences encoding a protein at least 50-55% homologous to each other typically remain hybridized to each other. The conditions can be such that sequences at least about 65%, at least about 70%, or at least about 75% or more homologous to each other typically remain hybridized to each other. Such stringent conditions are known to those skilled in the art and can be found in Current Protocols in Molecular Biology, John Wiley & Sons, N.Y. (1989), 6.3.1-6.3.6. One example of stringent hybridization conditions are hybridization in 6×sodium chloride/sodium citrate (SSC) at about 45 C, followed by one or more washes in 0.2×SSC, 0.1% SDS at 50-65 C.

[0120] Nucleic Acid Molecule Uses

[0121] The nucleic acid molecules of the present invention are useful for probes, primers, chemical intermediates, and in biological assays. The nucleic acid molecules are useful as a hybridization probe for cDNA and genomic DNA to isolate full-length cDNA and genomic clones encoding the protein described in the Figures and to isolate cDNA and genomic clones that correspond to variants (alleles, orthologs, etc.) producing the same or related proteins shown in the Figures.

[0122] The probe can correspond to any sequence along the entire length of the nucleic acid molecules provided in the Figures. Accordingly, it could be derived from 5′ noncoding regions, the coding region, and 3′ noncoding regions. However, as discussed, fragments are not to be construed as encompassing fragments disclosed prior to the present invention.

[0123] The nucleic acid molecules are also useful as primers for PCR to amplify any given region of a nucleic acid molecule and are useful to synthesize antisense molecules of desired length and sequence.

[0124] The nucleic acid molecules are also useful for constructing recombinant vectors. Such vectors include expression vectors that express a portion of, or all of, the protein sequences. Vectors also include insertion vectors, used to integrate into another nucleic acid molecule sequence, such as into the cellular genome, to alter in situ expression of a gene and/or gene product. For example, an endogenous coding sequence can be replaced via homologous recombination with all or part of the coding region containing one or more specifically introduced mutations.

[0125] The nucleic acid molecules are also useful for expressing antigenic portions of the proteins.

[0126] The nucleic acid molecules are also useful in making vectors containing the gene regulatory regions of the nucleic acid molecules of the present invention.

[0127] The nucleic acid molecules are also useful for designing ribozymes corresponding to all, or a part, of the mRNA produced from the nucleic acid molecules described herein.

[0128] The nucleic acid molecules are also useful for constructing host cells expressing a part, or all, of the nucleic acid molecules and proteins.

[0129] The nucleic acid molecules are also useful for constructing transgenic animals expressing all, or a part, of the nucleic acid molecules and proteins.

[0130] The nucleic acid molecules are also useful for making vectors that express part, or all, of the proteins.

[0131] The nucleic acid molecules are also useful as hybridization probes for determining the presence, level, form and distribution of nucleic acid expression. Accordingly, the probes can be used to detect the presence of, or to determine levels of, a specific nucleic acid molecule in cells, tissues, and in organisms. The nucleic acid whose level is determined can be DNA or RNA. Accordingly, probes corresponding to the proteins described herein can be used to assess expression and/or gene copy number in a given cell, tissue, or organism. These uses are relevant for efficacy of insecticides involving an increase or decrease in GPCR protein expression relative to normal results.

[0132] In vitro techniques for detection of mRNA include Northern hybridizations and in situ hybridizations. In vitro techniques for detecting DNA includes Southern hybridizations and in situ hybridization.

[0133] Probes can be used as a part of a diagnostic test kit for identifying cells or tissues that express a GPCR protein, such as by measuring a level of a receptor-encoding nucleic acid in a sample of cells from a subject e.g., mRNA or genomic DNA, or determining if a receptor gene has been mutated.

[0134] Nucleic acid expression assays are useful for drug/insecticide screening to identify compounds that modulate GPCR nucleic acid expression.

[0135] The invention thus provides a method for identifying a compound that can be used to treat a block the activity of the GPCR by modulating the expression of the GPCR gene. The method typically includes assaying the ability of the compound to modulate the expression of the GPCR nucleic acid and thus identifying a compound that can be used to kill insects by altering GPCR nucleic acid expression. The assays can be performed in cell-based and cell-free systems. Cell-based assays include cells naturally expressing the GPCR nucleic acid or recombinant cells genetically engineered to express specific nucleic acid sequences.

[0136] The assay for GPCR nucleic acid expression can involve direct assay of nucleic acid levels, such as mRNA levels, or on collateral compounds involved in the signal pathway. Further, the expression of genes that are up- or down-regulated in response to the GPCR protein signal pathway can also be assayed. In this embodiment the regulatory regions of these genes can be operably linked to a reporter gene such as luciferase.

[0137] Thus, modulators of GPCR gene expression can be identified in a method wherein a cell is contacted with a candidate compound and the expression of mRNA determined. The level of expression of GPCR mRNA in the presence of the candidate compound is compared to the level of expression of GPCR mRNA in the absence of the candidate compound. The candidate compound can then be identified as a modulator of nucleic acid expression based on this comparison and be used, for example to treat a disorder characterized by aberrant nucleic acid expression. When expression of mRNA is statistically significantly greater in the presence of the candidate compound than in its absence, the candidate compound is identified as a stimulator of nucleic acid expression. When nucleic acid expression is statistically significantly less in the presence of the candidate compound than in its absence, the candidate compound is identified as an inhibitor of nucleic acid expression.

[0138] The nucleic acid molecules are also, useful in diagnostic assays for qualitative changes in GPCR nucleic acid, and particularly in qualitative changes that lead to insecticidal activity/tolerance. The nucleic acid molecules can be used to detect mutations in GPCR genes and gene expression products such as mRNA.

[0139] The nucleic acid molecules are thus useful as antisense constructs to control GPCR gene expression in cells, tissues, and organisms. A DNA antisense nucleic acid molecule is designed to be complementary to a region of the gene involved in transcription, preventing transcription and hence production of GPCR protein. An antisense RNA or DNA nucleic acid molecule would hybridize to the mRNA and thus block translation of mRNA into GPCR protein.

[0140] The invention also encompasses kits for detecting the presence of a GPCR nucleic acid in a biological sample. For example, the kit can comprise reagents such as a labeled or labelable nucleic acid or agent capable of detecting GPCR nucleic acid in a biological sample; means for determining the amount of GPCR nucleic acid in the sample; and means for comparing the amount of GPCR nucleic acid in the sample with a standard. The compound or agent can be packaged in a suitable container. The kit can further comprise instructions for using the kit to detect GPCR protein mRNA or DNA.

[0141] Vectors/Host Cells

[0142] The invention also provides vectors containing the nucleic acid molecules described herein. The term “vector” refers to a vehicle, preferably a nucleic acid molecule, that can transport the nucleic acid molecules. When the vector is a nucleic acid molecule, the nucleic acid molecules are covalently linked to the vector nucleic acid. With this aspect of the invention, the vector includes a plasmid, single or double stranded phage, a single or double stranded RNA or DNA viral vector, or artificial chromosome, such as a BAC, PAC, YAC, OR MAC.

[0143] A vector can be maintained in the host cell as an extrachromosomal element where it replicates and produces additional copies of the nucleic acid molecules. Alternatively, the vector may integrate into the host cell genome and produce additional copies of the nucleic acid molecules when the host cell replicates.

[0144] The invention provides vectors for the maintenance (cloning vectors) or vectors for expression (expression vectors) of the nucleic acid molecules. The vectors can function in procaryotic or eukaryotic cells or in both (shuttle vectors).

[0145] Expression vectors contain cis-acting regulatory regions that are operably linked in the vector to the nucleic acid molecules such that transcription of the nucleic acid molecules is allowed in a host cell. The nucleic acid molecules can be introduced into the host cell with a separate nucleic acid molecule capable of affecting transcription. Thus, the second nucleic acid molecule may provide a trans-acting factor interacting with the cis-regulatory control region to allow transcription of the nucleic acid molecules from the vector. Alternatively, a trans-acting factor may be supplied by the host cell. Finally, a trans-acting factor can be produced from the vector itself. It is understood, however, that in some embodiments, transcription and/or translation of the nucleic acid molecules can occur in a cell-free system.

[0146] The regulatory sequence to which the nucleic acid molecules described herein can be operably linked include promoters for directing mRNA transcription. These include, but are not limited to, the left promoter from bacteriophage λ, the lac, TRP, and TAC promoters from E. coli, the early and late promoters from SV40, the CMV immediate early promoter, the adenovirus early and late promoters, and retrovirus long-terminal repeats.

[0147] In addition to control regions that promote transcription, expression vectors may also include regions that modulate transcription, such as repressor binding sites and enhancers. Examples include the SV40 enhancer, the cytomegalovirus immediate early enhancer, polyoma enhancer, adenovirus enhancers, and retrovirus LTR enhancers.

[0148] In addition to containing sites for transcription initiation and control, expression vectors can also contain sequences necessary for transcription termination and, in the transcribed region a ribosome binding site for translation. Other regulatory control elements for expression include initiation and termination codons as well as polyadenylation signals. The person of ordinary skill in the art would be aware of the numerous regulatory sequences that are useful in expression vectors. Such regulatory sequences are described, for example, in Sambrook et al., Molecular Cloning: A Laboratory Manual. 2nd. ed., Cold Spring Harbor Laboratory Press, Cold Spring Harbor, N.Y., (1989).

[0149] A variety of expression vectors can be used to express a nucleic acid molecule. Such vectors include chromosomal, episomal, and virus-derived vectors, for example vectors derived from bacterial plasmids, from bacteriophage, from yeast episomes, from yeast chromosomal elements, including yeast artificial chromosomes, from viruses such as baculoviruses, papovaviruses such as SV40, Vaccinia viruses, adenoviruses, poxviruses, pseudorabies viruses, and retroviruses. Vectors may also be derived from combinations of these sources such as those derived from plasmid and bacteriophage genetic elements, e.g. cosmids and phagemids. Appropriate cloning and expression vectors for prokaryotic and eukaryotic hosts are described in Sambrook et al., Molecular Cloning: A Laboratory Manual. 2nd. ed., Cold Spring Harbor Laboratory Press, Cold Spring Harbor, N.Y., (1989).

[0150] The regulatory sequence may provide constitutive expression in one or more host cells (i.e. tissue specific) or may provide for inducible expression in one or more cell types such as by temperature, nutrient additive, or exogenous factor such as a hormone or other ligand. A variety of vectors providing for constitutive and inducible expression in prokaryotic and eukaryotic hosts are well known to those of ordinary skill in the art.

[0151] The nucleic acid molecules can be inserted into the vector nucleic acid by well-known methodology. Generally, the DNA sequence that will ultimately be expressed is joined to an expression vector by cleaving the DNA sequence and the expression vector with one or more restriction enzymes and then ligating the fragments together. Procedures for restriction enzyme digestion and ligation are well known to those of ordinary skill in the art.

[0152] The vector containing the appropriate nucleic acid molecule can be introduced into an appropriate host cell for propagation or expression using well-known techniques. Bacterial cells include, but are not limited to, E. coli, Streptomyces, and Salmonella typhimurium. Eukaryotic cells include, but are not limited to, yeast, insect cells such as Drosophila, animal cells such as COS and CHO cells, and plant cells.

[0153] As described herein, it may be desirable to express the protein as a fusion protein. Accordingly, the invention provides fusion vectors that allow for the production of the proteins. Fusion vectors can increase the expression of a recombinant protein, increase the solubility of the recombinant protein, and aid in the purification of the protein by acting for example as a ligand for affinity purification. A proteolytic cleavage site may be introduced at the junction of the fusion moiety so that the desired peptide can ultimately be separated from the fusion moiety. Proteolytic enzymes include, but are not limited to, factor Xa, thrombin, and enterokinase. Typical fusion expression vectors include pGEX (Smith et al., Gene 67:31-40 (1988)), pMAL (New England Biolabs, Beverly, Mass.) and pRIT5 (Pharmacia, Piscataway, N.J.) which fuse glutathione S-transferase (GST), maltose E binding protein, or protein A, respectively, to the target recombinant protein. Examples of suitable inducible non-fusion E. coli expression vectors include pTrc (Amann et al., Gene 69:301-315 (1988)) and pET 11d (Studier et al., Gene Expression Technology: Methods in Enzymology 185:60-89 (1990)).

[0154] Recombinant protein expression can be maximized in a host bacteria by providing a genetic background wherein the host cell has an impaired capacity to proteolytically cleave the recombinant protein. (Gottesman, S., Gene Expression Technology: Methods in Enzymology 185, Academic Press, San Diego, Calif. (1990) 119-128). Alternatively, the sequence of the nucleic acid molecule of interest can be altered to provide preferential codon usage for a specific host cell, for example E. coli. (Wada et al., Nucleic Acids Res. 20:2111-2118 (1992)).

[0155] The nucleic acid molecules can also be expressed by expression vectors that are operative in yeast. Examples of vectors for expression in yeast e.g., S. cerevisiae include pYepSec1 (Baldari, et al., EMBO J. 6:229-234 (1987)), pMFa (Kurjan et al., Cell 30:933-943(1982)), pJRY88 (Schultz et al., Gene 54:113-123 (1987)), and pYES2 (Invitrogen Corporation, San Diego, Calif.).

[0156] The nucleic acid molecules can also be expressed in insect cells using, for example, baculovirus expression vectors. Baculovirus vectors available for expression of proteins in cultured insect cells (e.g., Sf9 cells) include the pAc series (Smith et al., Mol. Cell Biol. 3:2156-2165 (1983)) and the pVL series (Lucklow et al., Virology 170:31-39 (1989)).

[0157] In certain embodiments of the invention, the nucleic acid molecules described herein are expressed in mammalian cells using mammalian expression vectors. Examples of mammalian expression vectors include pCDM8 (Seed, B. Nature 329:840(1987)) and pMT2PC (Kaufman et al., EMBO J. 6:187-195 (1987)).

[0158] The expression vectors listed herein are provided by way of example only of the well-known vectors available to those of ordinary skill in the art that would be useful to express the nucleic acid molecules. The person of ordinary skill in the art would be aware of other vectors suitable for maintenance propagation or expression of the nucleic acid molecules described herein. These are found for example in Sambrook, J., Fritsh, E. F., and Maniatis, T. Molecular Cloning: A Laboratory Manual. 2nd, ed., Cold Spring Harbor Laboratory, Cold Spring Harbor Laboratory Press, Cold Spring Harbor, N.Y., 1989.

[0159] The invention also encompasses vectors in which the nucleic acid sequences described herein are cloned into the vector in reverse orientation, but operably linked to a regulatory sequence that permits transcription of antisense RNA. Thus, an antisense transcript can be produced to all, or to a portion, of the nucleic acid molecule sequences described herein, including both coding and non-coding regions. Expression of this antisense RNA is subject to each of the parameters described above in relation to expression of the sense RNA (regulatory sequences, constitutive or inducible expression, tissue-specific expression).

[0160] The invention also relates to recombinant host cells containing the vectors described herein. Host cells therefore include prokaryotic cells, lower eukaryotic cells such as yeast, other eukaryotic cells such as insect cells, and higher eukaryotic cells such as mammalian cells.

[0161] The recombinant host cells are prepared by introducing the vector constructs described herein into the cells by techniques readily available to the person of ordinary skill in the art. These include, but are not limited to, calcium phosphate transfection, DEAE-dextran-mediated transfection, cationic lipid-mediated transfection, electroporation, transduction, infection, lipofection, and other techniques such as those found in Sambrook, et al. (Molecular Cloning: A Laboratory Manual. 2nd, ed., Cold Spring Harbor Laboratory, Cold Spring Harbor Laboratory Press, Cold Spring Harbor, N.Y., 1989).

[0162] Host cells can contain more than one vector. Thus, different nucleotide sequences can be introduced on different vectors of the same cell. Similarly, the nucleic acid molecules can be introduced either alone or with other nucleic acid molecules that are not related to the nucleic acid molecules such as those providing trans-acting factors for expression vectors. When more than one vector is introduced into a cell, the vectors can be introduced independently, co-introduced or joined to the nucleic acid molecule vector.

[0163] In the case of bacteriophage and viral vectors, these can be introduced into cells as packaged or encapsulated virus by standard procedures for infection and transduction. Viral vectors can be replication-competent or replication-defective. In the case in which viral replication is defective, replication will occur in host cells providing functions that complement the defects.

[0164] Vectors generally include selectable markers that enable the selection of the subpopulation of cells that contain the recombinant vector constructs. The marker can be contained in the same vector that contains the nucleic acid molecules described herein or may be on a separate vector. Markers include tetracycline or ampicillin-resistance genes for prokaryotic host cells and dihydrofolate reductase or neomycin resistance for eukaryotic host cells. However, any marker that provides selection for a phenotypic trait will be effective.

[0165] While the mature proteins can be produced in bacteria, yeast, mammalian cells, and other cells under the control of the appropriate regulatory sequences, cell-free transcription and translation systems can also be used to produce these proteins using RNA derived from the DNA constructs described herein.

[0166] Where secretion of the protein is desired, which is difficult to achieve with multi-transmembrane domain containing proteins such as GPCRs, appropriate secretion signals are incorporated into the vector. The signal sequence can be endogenous to the proteins or heterologous to these proteins.

[0167] Where the protein is not secreted into the medium, which is typically the case with GPCRs, the protein can be isolated from the host cell by standard disruption procedures, including freeze thaw, sonication, mechanical disruption, use of lysing agents and the like. The protein can then be recovered and purified by well-known purification methods including ammonium sulfate precipitation, acid extraction, anion or cationic exchange chromatography, phosphocellulose chromatography, hydrophobic-interaction chromatography, affinity chromatography, hydroxylapatite chromatography, lectin chromatography, or high performance liquid chromatography.

[0168] It is also understood that depending upon the host cell in recombinant production of the proteins described herein, the proteins can have various glycosylation patterns, depending upon the cell, or maybe non-glycosylated as when produced in bacteria. In addition, the proteins may include an initial modified methionine in some cases as a result of a host-mediated process.

[0169] Nucleic Acid Arrays

[0170] The present invention further provides arrays or microarrays of nucleic acid molecules that are based on the sequence information provided in the Figure Sheets SEQ ID NOs: 1, 4, 7, . . . , 190, 193, 196 (genomic sequences) or SEQ ID NOs: 2, 5, 8, . . . , 191, 194, 197 (transcript sequences)).

[0171] As used herein “Arrays” or “Microarrays” refers to an array of distinct polynucleotides or oligonucleotides synthesized on a substrate, such as paper, nylon or other type of membrane, filter, chip, glass slide, or any other suitable solid support. In one embodiment, the microarray is prepared and used according to the methods described in U.S. Pat. No. 5,837,832, Chee et al., PCT application W095/11995 (Chee et al.), Lockhart, D. J. et al. (1996; Nat. Biotech. 14: 1675-1680) and Schena, M. et al. (1996; Proc. Natl. Acad. Sci. 93: 10614-10619), all of which are incorporated herein in their entirety by reference. In other embodiments, such arrays are produced by the methods described by Brown et. al., U.S. Pat. No. 5,807,522.

[0172] The microarray is preferably composed of a large number of unique, single-stranded nucleic acid sequences, usually either synthetic antisense oligonucleotides or fragments of cDNAs, fixed to a solid support. The oligonucleotides are preferably about 6-60 nucleotides in length, more preferably 15-30 nucleotides in length, and most preferably about 20-25 nucleotides in length. For a certain type of microarray, it may be preferable to use oligonucleotides that are only 7-20 nucleotides in length. The microarray may contain oligonucleotides that cover the known 5′, or 3′, sequence, sequential oligonucleotides which cover the full length sequence; or unique oligonucleotides selected from particular areas along the length of the sequence. Polynucleotides used in the microarray may be oligonucleotides that are specific to a gene or genes of interest.

[0173] In order to produce oligonucleotides to a known sequence for a microarray, the gene(s) of interest (or an ORF identified from the contigs of the present invention) is typically examined using a computer algorithm which starts at the 5′ or at the 3′ end of the nucleotide sequence. Typical algorithms will then identify oligomers of defined length that are unique to the gene, have a GC content within a range suitable for hybridization, and lack predicted secondary structure that may interfere with hybridization. In certain situations it may be appropriate to use pairs of oligonucleotides on a microarray. The “pairs” will be identical, except for one nucleotide that preferably is located in the center of the sequence. The second oligonucleotide in the pair (mismatched by one) serves as a control. The number of oligonucleotide pairs may range from two to one million. The oligomers are synthesized at designated areas on a substrate using a light-directed chemical process. The substrate may be paper, nylon or other type of membrane, filter, chip, glass slide or any other suitable solid support.

[0174] In another aspect, an oligonucleotide may be synthesized on the surface of the substrate by using a chemical coupling procedure and an ink jet application apparatus, as described in PCT application W095/251116 (Baldeschweiler et al.) which is incorporated herein in its entirety by reference. In another aspect, a “gridded” array analogous to a dot (or slot) blot may be used to arrange and link cDNA fragments or oligonucleotides to the surface of a substrate using a vacuum system, thermal, UV, mechanical or chemical bonding procedures. An array, such as those described above, may be produced by hand or by using available devices (slot blot or dot blot apparatus), materials (any suitable solid support), and machines (including robotic instruments), and may contain 8, 24, 96, 384, 1536, 6144 or more oligonucleotides, or any other number between two and one million which lends itself to the efficient use of commercially available instrumentation.

[0175] In order to conduct sample analysis using a microarray, the RNA or DNA from a biological sample is made into hybridization probes. The mRNA is isolated, and cDNA is produced and used as a template to make antisense RNA (aRNA). The aRNA is amplified in the presence of fluorescent nucleotides, and labeled probes are incubated with the microarray so that the probe sequences hybridize to complementary oligonucleotides of the microarray. Incubation conditions are adjusted so that hybridization occurs with precise complementary matches or with various degrees of less complementarity. After removal of nonhybridized probes, a scanner is used to determine the levels and patterns of fluorescence. The scanned images are examined to determine degree of complementarity and the relative abundance of each oligonucleotide sequence on the microarray. The biological samples may be obtained from any bodily fluids (such as blood, urine, saliva, phlegm, gastric juices, etc.), cultured cells, biopsies, or other tissue preparations. A detection system may be used to measure the absence, presence, and amount of hybridization for all of the distinct sequences simultaneously. This data may be used for large scale correlation studies on the sequences, expression patterns, mutations, variants, or polymorphisms among samples.

[0176] Using such arrays, the present invention provides methods to identify the expression of one or more of the proteins/peptides of the present invention. In detail, such methods comprise incubating a test sample with one or more nucleic acid molecules and assaying for binding of the nucleic acid molecule with components within the test sample. Such assays will typically involve arrays comprising many genes, at least one of which is a gene of the present invention.

[0177] Conditions for incubating a nucleic acid molecule with a test sample vary. Incubation conditions depend on the format employed in the assay, the detection methods employed, and the type and nature of the nucleic acid molecule used in the assay. One skilled in the art will recognize that any one of the commonly available hybridization, amplification or array assay formats can readily be adapted to employ the novel fragments of the Drosophila genome disclosed herein. Examples of such assays can be found in Chard, T, An Introduction to Radioimmunoassay and Related Techniques, Elsevier Science Publishers, Amsterdam, The Netherlands (1986); Bullock, G. R. et al., Techniques in Immunocytochemistry, Academic Press, Orlando, Fla. Vol. 1 (1982), Vol. 2 (1983), Vol. 3 (1985); Tijssen, P., Practice and Theory of Enzyme Immunoassays: Laboratory Techniques in Biochemistry and Molecular Biology, Elsevier Science Publishers, Amsterdam, The Netherlands (1985).

[0178] The test samples of the present invention include cells, protein or membrane extracts of cells. The test sample used in the above-described method will vary based on the assay format, nature of the detection method and the tissues, cells or extracts used as the sample to be assayed. Methods for preparing nucleic acid extracts or of cells are well known in the art and can be readily be adapted in order to obtain a sample that is compatible with the system utilized.

[0179] In another embodiment of the present invention, kits are provided which contain the necessary reagents to carry out the assays of the present invention.

[0180] Specifically, the invention provides a compartmentalized kit to receive, in close confinement, one or more containers which comprises: (a) a first container comprising one of the nucleic acid molecules that can bind to a fragment of the Drosophila genome disclosed herein; and (b) one or more other containers comprising one or more of the following: wash reagents, reagents capable of detecting presence of a bound nucleic acid. Preferred kits will include chips that are capable of detecting the expression of 10 or more, or 50 or more, or all of the GPCR genes expressed in Drosophila.

[0181] In detail, a compartmentalized kit includes any kit in which reagents are contained in separate containers. Such containers include small glass containers, plastic containers, strips of plastic, glass or paper, or arraying material such as silica. Such containers allows one to efficiently transfer reagents from one compartment to another compartment such that the samples and reagents are not cross-contaminated, and the agents or solutions of each container can be added in a quantitative fashion from one compartment to another. Such containers will include a container which will accept the test sample, a container which contains the nucleic acid probe, containers which contain wash reagents (such as phosphate buffered saline, Tris-buffers, etc.), and containers which contain the reagents used to detect the bound probe. One skilled in the art will readily recognize that the previously unidentified GPCR genes of the present invention can be routinely identified using the sequence information disclosed herein can be readily incorporated into one of the established kit formats which are well known in the art, particularly expression arrays.

[0182] Uses of Vectors and Host Cells

[0183] The recombinant host cells expressing the proteins described herein have a variety of uses. First, the cells are useful for producing a GPCR protein or protein that can be further purified to produce desired amounts of GPCR protein or fragments. Thus, host cells containing expression vectors are useful for protein production.

[0184] Host cells are also useful for conducting cell-based assays involving the GPCR protein or GPCR protein fragments, such as those described above as well as other formats known in the art. Thus, a recombinant host cell expressing a native GPCR protein is useful for assaying compounds that stimulate or inhibit GPCR protein function.

[0185] Host cells are also useful for identifying GPCR protein mutants in which these functions are affected. If the mutants naturally occur and give rise to a pathology, host cells containing the mutations are useful to assay compounds that have a desired effect on the mutant GPCR protein (for example, stimulating or inhibiting function) which may not be indicated by their effect on the native GPCR protein.

[0186] Genetically engineered host cells can be further used to produce non-human transgenic animals. A transgenic animal is preferably a mammal, for example a rodent, such as a rat or mouse, in which one or more of the cells of the animal include a transgene. A transgene is exogenous DNA which is integrated into the genome of a cell from which a transgenic animal develops and which remains in the genome of the mature animal in one or more cell types or tissues of the transgenic animal. These animals are useful for studying the function of a GPCR protein and identifying and evaluating modulators of GPCR protein activity. Other examples of transgenic animals include non-human primates, sheep, dogs, cows, goats, chickens, and amphibians.

[0187] A transgenic animal can be produced by introducing nucleic acid into the male pronuclei of a fertilized oocyte, e.g., by microinjection, retroviral infection, and allowing the oocyte to develop in a pseudopregnant female foster animal. Any of the GPCR protein nucleotide sequences can be introduced as a transgene into the genome of a non-human animal, such as a mouse.

[0188] Any of the regulatory or other sequences useful in expression vectors can form part of the transgenic sequence. This includes intronic sequences and polyadenylation signals, if not already included. A tissue-specific regulatory sequence(s) can be operably linked to the transgene to direct expression of the GPCR protein to particular cells.

[0189] Methods for generating transgenic animals via embryo manipulation and microinjection, particularly animals such as mice, have become conventional in the art and are described, for example, in U.S. Pat. Nos. 4,736,866 and 4,870,009, both by Leder et al., U.S. Pat. No. 4,873,191 by Wagner et al. and in Hogan, B., Manipulating the Mouse Embryo, (Cold Spring Harbor Laboratory Press, Cold Spring Harbor, N.Y., 1986). Similar methods are used for production of other transgenic animals. A transgenic founder animal can be identified based upon the presence of the transgene in its genome and/or expression of transgenic mRNA in tissues or cells of the animals. A transgenic founder animal can then be used to breed additional animals carrying the transgene. Moreover, transgenic animals carrying a transgene can further be bred to other transgenic animals carrying other transgenes. A transgenic animal also includes animals in which the entire animal or tissues in the animal have been produced using the homologously recombinant host cells described herein.

[0190] In another embodiment, transgenic non-human animals can be produced which contain selected systems which allow for regulated expression of the transgene. One example of such a system is the cre/loxP recombinase system of bacteriophage P1. For a description of the cre/loxP recombinase system, see, e.g., Lakso et al. PNAS 89:6232-6236 (1992). Another example of a recombinase system is the FLP recombinase system of S. cerevisiae (O'Gorman et al. Science 251:1351-1355 (1991). If a cre/loxP recombinase system is used to regulate expression of the transgene, animals containing transgenes encoding both the Cre recombinase and a selected protein is required. Such animals can be provided through the construction of “double” transgenic animals, e.g., by mating two transgenic animals, one containing a transgene encoding a selected protein and the other containing a transgene encoding a recombinase.

[0191] Clones of the non-human transgenic animals described herein can also be produced according to the methods described in Wilmut, I. et al. Nature 385:810-813 (1997) and PCT International Publication Nos. WO 97/07668 and WO 97/07669. In brief, a cell, e.g., a somatic cell, from the transgenic animal can be isolated and induced to exit the growth cycle and enter Gₒ phase. The quiescent cell can then be fused, e.g., through the use of electrical pulses, to an enucleated oocyte from an animal of the same species from which the quiescent cell is isolated. The reconstructed oocyte is then cultured such that it develops to morula or blastocyst and then transferred to pseudopregnant female foster animal. The offspring born of this female foster animal will be a clone of the animal from which the cell, e.g., the somatic cell, is isolated.

[0192] Transgenic animals containing recombinant cells that express the proteins described herein are useful to conduct the assays described herein in an in vivo context. Accordingly, the various physiological factors that are present in vivo and that could effect ligand binding, GPCR protein activation, and signal transduction, may not be evident from in vitro cell-free or cell-based assays. Accordingly, it is useful to provide non-human transgenic animals to assay in vivo GPCR protein function, including ligand interaction, the effect of specific mutant GPCR proteins on GPCR protein function and ligand interaction, and the effect of chimeric GPCR proteins. It is also possible to assess the effect of null mutations, that is mutations that substantially or completely eliminate one or more GPCR protein functions.

[0193] All publications and patents mentioned in the above specification are herein incorporated by reference. Various modifications and variations of the described method and system of the invention will be apparent to those skilled in the art without departing from the scope and spirit of the invention. Although the invention has been described in connection with specific preferred embodiments, it should be understood that the invention as claimed should not be unduly limited to such specific embodiments. Indeed, various modifications of the above-described modes for carrying out the invention which are obvious to those skilled in the field of molecular biology or related fields are intended to be within the scope of the following claims.

TABLE 1

| | | |
|---|---|---|
| F | W | V |

| | | | |
|---|---|---|---|
| Gene | Transcript | Similar to | E Value |

A. Rhodopsin-like receptor family Orphan receptors

Opsin-like

| | | | | | |
|---|---|---|---|---|---|
| CG5638 | CT17820 | Rh3 | e-57 | e-14 | e-44 |

Receptors for biogenic amines and related compounds
5-HT receptor-like

| | | | | | |
|---|---|---|---|---|---|
| CG8007 | CT24060 | 5-HT2 | e-21 | e-35 | e-27 |

Muscarinic Acetylcholine receptor-like

| | | | | | |
|---|---|---|---|---|---|
| CG7918 | CT23924 | mAcR-60C | e-32 | e-49 | e-41 |

Unclassifiable biogenic amine receptor-like

| | | | | | |
|---|---|---|---|---|---|
| CG17004 | CT37739 | 5-HT7 | e-18 | e-20 | e-28 |
| CG7431 | CT22855 | CG16766 | e-70 | e-45 | e-37 |
| CG16766 | CT37292 | CG7431 | e-53 | e-31 | e-22 |
| CG6919 | CT21432 | CG6989 | e-82 | e-46 | e-57 |
| CG6989 | CT21650 | CG6919 | e-82 | e-39 | e-46 |
| CG7078 | CT21843 | CG6919 | e-73 | e-46 | e-38 |
| CG18314 | CT41076 | CG6919 | e-21 | e-48 | e-25 |
| CG7994 | CT24036 | | >e-10 | >e-10 | e-10 |

Purine receptors
Adenosine receptor-like

| | | | | | |
|---|---|---|---|---|---|
| CG9753 | CT27563 | CG6989 | e-19 | e-29 | e-42 |

Peptide receptors
Allatostatin receptor-like

| | | | | | |
|---|---|---|---|---|---|
| CG10001 | CT28187 | EG.121E7.2 | e-62 | e-35 | e-34 |

FSH/TSH/LH receptor-like

| | | | | | |
|---|---|---|---|---|---|
| CG4187 | CT13764 | CG5042 | e-48 | e-23 | e-24 |
| CG5042 | CT16185 | CG4187 | e-44 | e-25 | e-23 |

Gastrin/CCK receptor-like

| | | | | | |
|---|---|---|---|---|---|
| CG6857 | CT21155 | CG6881 | e-96 | e-33 | e-19 |
| CG6881 | CT21314 | CG6857 | e-96 | e-23 | e-33 |

Gonadotropin releasing hormone receptor-like

| | | | | | |
|---|---|---|---|---|---|
| CG10698 | CT29989 | GRHR | e-43 | e-34 | e-39 |

Growth hormone secretagoge receptor-like

| | | | | | |
|---|---|---|---|---|---|
| CG8784 | CT25324 | CG8795 | e-165 | e-38 | e-35 |
| CG8795 | CT25350 | CG8784 | e-165 | e-40 | e-37 |
| CG9918 | CT27924 | CG8795 | e-83 | e-53 | e-33 |

Tachykinin receptor-like

| | | | | | |
|---|---|---|---|---|---|
| CG1147 | CT1960 | NepYr | e-31 | e-43 | e-40 |
| CG10626 | CT29768 | Takr99D | e-53 | e-41 | e-44 |

Somatostatin receptor-like

| | | | | | |
|---|---|---|---|---|---|
| CG7285 | CT22465 | CG13702 | e-96 | e-24 | e-51 |
| CG13702 | CT33159 | CG7285 | e-96 | e-26 | e-46 |

Vasopressin receptor-like

| | | | | | |
|---|---|---|---|---|---|
| CG6111 | CT19191 | GRHR | e-36 | e-26 | e-45 |

Unclassifiable peptide receptors

| | | | | | |
|---|---|---|---|---|---|
| CG13575 | CT32957 | CG10626 | e-08 | e-08 | e-8# |
| CG14003 | CT33559 | Takr99D | e-14 | e-12 | e-14# |
| CG5911 | CT18539 | Takr86C | e-18 | e-19 | e-26# |
| CG10823 | CT15916 | CG6857 | e-10 | e-10 | e-12 |

Oprhan receptors
related to C. elegans orphan receptors

| | | | | | |
|---|---|---|---|---|---|
| CG2114 | CT2366 | | >e-10 | e-27 | e-10 |
| CG3171 | CT10621 | EG:22E5.10 | e-50 | e-16 | e-26 |
| CG5936 | CT18637 | | >e-10 | e-18 | >e-10 |
| CG8985 | CT25824 | CG13803 | 3-162 | e-31 | >e-10 |
| CG13803 | CT33298 | CG8985 | e-162 | e-36 | >e-10 |
| CG13229 | CT32473 | CG13803 | e-58 | e-35 | e-10 |

Other orphan receptors

| | | | | | |
|---|---|---|---|---|---|
| CG9569 | CT17758 | | >e-10 | >e-10 | >e-10 |
| CG12290 | CT19320 | | >e-10 | >e-10 | >e-10 |
| CG6986 | CT21642 | CG16726 | e-10 | >e-10 | >e-10 |
| CG13579 | CT32961 | | >e-10 | e-18 | >e-10 |
| CG13995 | CT335551 | | >e-10 | e-10 | e-11 |
| CG7497 | CT23019 | | >e-10 | >e-10 | >e-10 |

Calcitonin receptor-like

| | | | | | |
|---|---|---|---|---|---|
| CG4395 | CT4121 | CG17415 | e-46 | e-16 | e-41 |
| CG17415 | CT38445 | CG4395 | e-42 | e-20 | e-61 |
| CG13758 | CT33238 | CG8422 | e-40# | e-65 | e-66 |

B. Se Diuretic hormone receptor-like

| | | | | | |
|---|---|---|---|---|---|
| CG8422 | CT24513 | CG12370 | e-122 | e25 | e-65 |
| CG12370 | CT24959 | CG8422 | e-122 | e-30 | e-101 |

HE6 receptor-like

| | | | | | |
|---|---|---|---|---|---|
| CG11318 | CT31591 | CG15556 | e-104 | e-11 | e-20 |
| CG15556 | CT35672 | CG11318 | e-103 | >e-11 | e-6 |

Lathrophilin-like

| | | | | |
|---|---|---|---|---|
| CG8639 | CT8755 | >e-10 | e-47 | e-45 |

Methuselah-like

| | | | | | |
|---|---|---|---|---|---|
| CG4521 | CT14539 | CG6965 | e-30 | e-13 | |
| CG17795 | CT16507 | mth | e-132 | >e-10 | >e-10 |
| CG6530 | CT20339 | CG6536 | e-104 | >e-10 | >e-10 |
| CG6536 | CT20351 | CG6530 | e-115 | >e-10 | |
| CG6965 | CT21585 | CG17795 | e-12 | >e-10 | e-10 |
| CG7476 | CT22963 | mth | e-66 | >e-10 | >e-10 |
| CG13406 | CT32762 | CG17084 | e-47 | >e-10 | >e-10 |
| CG17084 | CT33414 | CG13406 | e-47 | >e-10 | >e-10 |
| CG17061 | CT33415 | mth | e-80 | >e-10 | >e-10 |
| CG16992 | CT37715 | mth | e-32 | >e-10 | >e-10 |

C. Metabotropic glutamate receptor family

GABA-B receptor-like

| | | | | | |
|---|---|---|---|---|---|
| CG3022 | CT9836 | CG6706 | e-96 | e-56 | e-85 |
| CG6706 | CT20836 | CG3022 | e-120 | e-61 | e-169 |
| CG15274 | CT35221 | CG3022 | e-49 | e-156 | e-129 |

Metabotropic glutamate receptor-like

| | | | | | |
|---|---|---|---|---|---|
| CG8692 | CT5032 | GLu-RA | e-152 | e-115 | e-157 |

Other

| | | | | | |
|---|---|---|---|---|---|
| CG7155 | CT22117 | | >e-10 | >e-10 | >e-10 |
| CG11923 | CT35779 | CG17215 | e-17 | >e-10 | e-17 |

D. Atypical 7 TM proteins

Frizzled-like

| | | | | | |
|---|---|---|---|---|---|
| CG4626 | CT9057 | fz | e-36 | e-54 | e-76 |

Which is claimed is:

1. An isolated protein consisting of an amino acid sequence selected from the group consisting of:
(a) the amino acid sequence shown in SEQ ID NOs: 3, 6, 9, . . . , 192, 195, 198;
(b) the amino acid sequence of an allelic variant of the amino acid sequence shown in SEQ ID NOs: 3, 6, 9, . . . , 192, 195, 198, wherein said allelic variant is encoded by a nucleic acid molecule that hybridizes to the nucleic acid molecule shown in SEQ ID NOs: 1, 4, 7, . . . , 795, 798, 801 (genomic sequences); SEQ ID NOs: 2, 5, 8, . . . , 796, 799, 802 (transcript sequences), under stringent conditions;
(c) the amino acid sequence of an ortholog of an amino acid sequence shown in SEQ ID NOs: 3, 6, 9, . . . , 192, 195, 198, wherein said ortholog is encoded by a nucleic acid molecule that hybridizes to the nucleic acid molecule shown in SEQ ID NOs: 1, 4, 7, . . . , 795, 798, 801 (genomic sequences); SEQ ID NOs: 2, 5, 8, . . . , 796, 799, 802 (transcript sequences), under stringent condition;
(d) a fragment of the amino acid sequence shown in SEQ ID NOs: 3, 6, 9, . . . , 192, 195, 198, wherein the fragment comprises at least 10 contiguous amino acids.

2. An isolated protein comprising an amino acid sequence selected from the group consisting of:
(a) the amino acid sequence shown in SEQ ID NOs: 3, 6, 9, . . . , 192, 195, 198;
(b) the amino acid sequence of an allelic variant of the amino acid sequence shown in SEQ ID NOs: 3, 6, 9, . . . , 192, 195, 198, wherein said allelic variant is encoded by a nucleic acid molecule that hybridizes to the nucleic acid molecule shown in SEQ ID NOs: 1, 4, 7, . . . , 795, 798, 801 (genomic sequences); SEQ ID NOs: 2, 5, 8, . . . , 796, 799, 802 (transcript sequences), under stringent conditions;
(c) the amino acid sequence of an ortholog of an amino acid sequence shown in the SEQ ID NOs: 3, 6, 9, . . . , 192, 195, 198, wherein said ortholog is encoded by a nucleic acid molecule that hybridizes to the nucleic acid molecule shown in SEQ ID NOs: 1, 4, 7, . . . , 795, 798, 801 (genomic sequences); SEQ ID NOs: 2, 5, 8, . . . , 796, 799, 802 (transcript sequences), under stringent condition;
(d) a fragment of the amino acid sequence shown in the SEQ ID NOs: 3, 6, 9, . . . , 192, 195, 198, wherein the fragment comprises at least 10 contiguous amino acids.

3. An isolated antibody that selectively binds to a protein of claim 1.

4. An isolated nucleic acid molecule consisting of a nucleotide sequence selected from the group consisting of:
(a) a nucleotide sequence that encodes the amino acid sequence shown in SEQ ID NOs: 3, 6, 9, . . . , 192, 195, 198;
(b) a nucleotide sequence that encodes of an allelic variant of the amino acid sequence shown in SEQ ID NOs: 3, 6, 9, . . . , 192, 195, 198, wherein said nucleic acid molecule hybridizes to the nucleic acid molecule shown in SEQ ID NOs: 1, 4, 7, . . . , 190, 193, 196 (genomic sequences) or SEQ ID NOs: 2, 5, 8, . . . , 191, 194, 197 (transcript sequences)), under stringent conditions;
(c) a nucleotide sequence that encodes an ortholog of an amino acid sequence shown in SEQ ID NOs: 3, 6, 9, . . . , 192, 195, 198, wherein said nucleic acid molecule hybridizes to the nucleic acid molecule shown in SEQ ID NOs: 1, 4, 7, . . . , 190, 193, 196 (genomic sequences) or SEQ ID NOs: 2, 5, 8, . . . , 191, 194, 197 (transcript sequences)), under stringent condition;
(d) a nucleotide sequence that encodes a fragment of the amino acid sequence shown in the SEQ ID NOs: 3, 6, 9, . . . , 192, 195, 198, wherein said the fragment comprises at least 10 contiguous amino acids; and
(e) A nucleic acid molecule that is the complement of a nucleic acid molecule of (a)-(d).

5. An isolated nucleic acid molecule comprising a nucleotide sequence selected from the group consisting of:
(a) a nucleotide sequence that encodes the amino acid sequence shown in SEQ ID NOs: 3, 6, 9, . . . , 192, 195, 198;
(b) a nucleotide sequence that encodes of an allelic variant of the amino acid sequence shown in SEQ ID NOs: 3, 6, 9, . . . , 192, 195, 198, wherein said nucleic acid molecule hybridizes to the nucleic acid molecule shown in SEQ ID NOs: 1, 4, 7, . . . , 190, 193, 196 (genomic sequences) or SEQ ID NOs: 2, 5, 8, . . . , 191, 194, 197 (transcript sequences)), under stringent conditions;
(c) a nucleotide sequence that encodes an ortholog of an amino acid sequence shown in the SEQ ID NOs: 3, 6, 9, . . . , 192, 195, 198, wherein said nucleic acid molecule hybridizes to the nucleic acid molecule shown in SEQ ID NOs: 1, 4, 7, . . . , 190, 193, 196 (genomic sequences) or SEQ ID NOs: 2, 5, 8, . . . , 191, 194, 197 (transcript sequences)), under stringent condition;
(d) a nucleotide sequence that encodes a fragment of the amino acid sequence shown in the SEQ ID NOs: 3, 6, 9, . . . , 192, 195, 198, wherein said the fragment comprises at least 10 contiguous amino acids; and
(f) A nucleic acid molecule that is the complement of a nucleic acid molecule of (a)-(d).

6. A nucleic acid vector comprising the nucleic acid sequences of claim 4.

7. A nucleic acid vector comprising the nucleic acid sequences of claim 5.

8. A host cell containing the vector of claim 6.

9. A host cell containing the vector of claim 7.

10. A method for producing any of the proteins of claim 1 comprising introducing a nucleotide sequence encoding any of the protein sequences in (a)-(d) into a host cell, and culturing the host cell under conditions in which the proteins are expressed from the nucleic acid.

11. A method for producing any of the proteins of claim 2 comprising introducing a nucleotide sequence encoding any of the protein sequences in (a)-(d) into a host cell, and culturing the host cell under conditions in which the proteins are expressed from the nucleic acid.

12. A method for detecting the presence of any of the proteins of claim 1 in a sample, said method comprising contacting said sample with an agent that specifically allows detection of the presence of the protein in the sample and then detecting the presence of the protein.

13. A method for detecting the presence of any of the proteins of claim 2 in a sample, said method comprising contacting said sample with an agent that specifically allows detection of the presence of the protein in the sample and then detecting the presence of the protein.

14. A kit comprising reagents used for the method of claim 12, wherein the reagents comprise an agent that specifically binds to said protein.

15. A method for detecting the presence of a nucleic acid sequence of claim 4 in a sample, the method comprising contacting the sample with an oligonucleotide that hybridizes to the nucleic acid sequences under stringent conditions and determining whether the oligonucleotide binds to the nucleic acid sequence in the sample.

16. A method for detecting the presence of a nucleic acid sequence of claim 5 in a sample, the method comprising contacting the sample with an oligonucleotide that hybridizes to the nucleic acid sequences under stringent conditions and determining whether the oligonucleotide binds to the nucleic acid sequence in the sample.

17. A kit comprising reagents used for the method of claim 15, wherein the reagents comprise a compound that hybridizes under stringent conditions to any of the nucleic acid molecules.

18. A kit comprising reagents used for the method of claim 16, wherein the reagents comprise a compound that hybridizes under stringent conditions to any of the nucleic acid molecules.

19. A method for identifying an agent that binds to any of the proteins of claim 1, said method comprising contacting the protein with an agent and assaying the contacted mixture to determine whether a complex is formed with the agent bound to the protein.

20. A method for identifying an agent that binds to any of the proteins of claim 2, said method comprising contacting the protein with an agent and assaying the contacted mixture to determine whether a complex is formed with the agent bound to the protein.

The application's sequence listing, which the Patent Office published only in electronic form, follows.

SEQUENCE LISTING (198 sequences)

SEQ ID NO: 1 - DNA, 5236 bp, Drosophila
caaaaactaaaacaacaaaaagccggcaagcaatggtatacaaaataaataaaaaaaaatatgacaagagaaaatccacaaaaaaatgaaataaaattgaatgaaaaatttaccaaaaaccaagttgtttttattccaagtgtatgtagttggcaatcaaacgattcaactgcagttaacatgatttattcgctacgtaagtgtgcttggctaagttgaataaatatcattaatatctgtcagctacattaaaggttcaaacattacatatatatatatctatatatttatcttaacattattaaatgtttaagggcttaaaaaaaaatatccttaggtacacgggtacgtatgtattattctgcgtctctttctatatcctctcaggatttgaatatattttgtattataaaatattacgcataaaatcatcggggggaacctgttaattcttggcatttgattcccgcattttctctggatatggcatagatatttttctagggttagctgtgtgaaacctaaatatttttaagttaaatttaaacaacgatttatacggctgacacattttaaatttttctgggttcaagcttagattttgtttacatgtttttttcttaatgcttaacactatgctttatatactttttcaaaatatattttaaaacttgttcagtaaaaagttttaaagtgataattcttaacagagtttttttagaaactttttttttagaaagatcaagcatacaattatttgtttttatcaataattcatatgactagaacctttcttttctaaatgcatttcgggcatagtatcccaggataaaaaatataacaggaacattttaaataattgaaatcagtatgcattttaacaaaattaagttataaaaaaaaatattttgctatcatgaaataagtgtgccggactggtcttcaaaatctttgctcggcgatgcggtcaatgttacgatcgaccctcgcgcggtacgccttaaacgcccaactctcggctgggcgtggtcgtggccatctgtccagtattactcccggccggcggcggggtcactaaactgggcagcaacttgttcagcagcgtgcgaatggcaaaggtgacatcgtgattggcgaagcagaacaggaaggagaccacaaagccctgcaggctgaccaacaccaccgatagcatctgatagaagtggtccagctgggtgccggcatccggacggtagggcagcaggaagtgttgcagtccgaacagcggtaccagaataatggtggcccgaaccgccttccggatggccaacggtgccggctgggcggactggggatgtaactttcgcacgatcactcgcagtacgttgatcagaaaaactgttgggtaaaatgcatatagctgagcaatattgtacttttaaagaaaattatgcatattactaaagctggccagcagcgaaagagttatgggcaccgagaagatccacaagtagagactgtcagttatccagcagctgcaataatgtgaaaagaaatgttaccatggatatagcgtagaatgtaatctcttaataaatgcaatgcaaaaaccaaatcaatcaggattatgtcttgtgtaaaattgtgaaaataacttactgcttattgtccggactactgaaatgcctggccagaccgtagacgatggctatgggtatgggtgaaaaccagctgatgacaataaaccagcgcatcacaatcgtgtccttgacaaagacctggcgaatggaaagaagaaggggcgtcaggatctgaacggacattcctgacatctcaacttgacgcagacgtaaagcagttggccaacgttgcgatttgctctcagacaaattgctgggggtgaaccattgccatgtcagcggctgcaggaaatcacatctgccatgcacagaagtcgcccataaagaatgcagacttgtgcaggcaattgccagattgccagacgagtaaggataactcaccacaacgagcaccaggtgcaggtgcaggccctcgcaaaacatccagaaatagttgaccaacataaagtagtgcaccaccagatgcagcccaatgcaccacagctgaaagttagttatgtttatggttttgtataattgcctagctacttgtagggctatgttattttcatagttacttttctcagtgcatcttaccggattttcggctatggtttcggaacgctccaccaccagacgataccataatatccaggccacacaggtgcaggccagcgaggcgaacagatgtacatggatgcggatgcgggtgcagcgcagggatctgcaaacggaatggaacggaacggaaagaaacgaaaagggatatccggccgtcagttaccggagggaaaggaaccgtgtgggtcgtagacaaacacttacttgaagcccaagaaaataataatcgatatgagcagggccagcagggagagggcataacccttcacgtacagctcgttgatgaactggcgaaactgcagtggcaactttcttgattaatgcccatgtaccacccgcttgatgccgccgaagcacttacctccaggtcctcatagtccacgcagttggtgtaattggaccaggtctgattgctaaccggatgacggtaccaggagccgttctccaggcagctatgaatgcgaaatgcttacgataattgtgactggctaagtgcggactgatgggtaaagggggtatttctaacaaagcgcctgacaatgcacaagttacccaactttaccaggagccagctgagctcagttggcgtgtaaagtgagatgaacgctatccattaaattggagatacatacatgtagtgcaagttttagagtgctgctacagtacacttagggagattatctctgcaagagttgaagaaggttttatttttctttcattttccatcatctttttctgagatatgctgcgagtttatgtaatagacacgaatgtaaactctataggattttccctgtttgtagcgcactcatacataaacattgtattttatgacacacagaacacattaaagcaaatgccgaatatggcaagatattttcgaatttatgctcaaacgaatattacatattgcagagcttatttgaccatgcgaaatcctgaacggaatgaaaatctatcctattcgtggtggcgtaatatacaggcatattgggcatttaactcacgtcttgtgggccagaaattttctgttgaatccttcgacgaaatcgggacaatattgactcagcacagtgccggccggagtccttggccagcagagatatccgtcaaagttcagggggcaaaagagtcggttctccttctgatttgtggccatcgtggcactgacgacggtggccatcagctcctccttctccgccagctcctcgtccacgtttcgcatgtcaataacgccctcgttcatcgcggcattctccagatatcgcggcactgggctaaagttctccggcaaatcggaatcgtagtctgtgcacggcgacaagtgccattaaaatgggtttactttttaatgtataaaaatatagcatttttaataatagtatctatgggctgcataactgaaagtgatgtaattcagttttcaagttcaattcaattgcatgcttgctttacatatgtaaaataaagtggtatttcaaatgtacataacttgcttaagatagttaatagatcatcgttctttatagcagggtataattcataaattctggttgaaaatatatgtacatttggtaaaggtgttgagtgctatttaaatttataaatttgtcctgagatgccaatgatttgcattgaaacgaaaacccatgtttaaatttgcatccccaagaagtaagtcaatgattttgtatatatttaaatacattactttgaaatgcattaaatgaaatcagatgggctgtaatttaatttaattctcttctctttcttatctgtcttatgcctctgctattttttcgcggcaaatcacgtatacgcctgttggccgccactcacctgttgctgggccaagtgaaaatgatgggtcgtccgtatcgtatgtgacattctggtatcggaacacgcactccgcatacaaatgctttaaaaatatgcgcagattatcctgcgtttgggcctgcgatgccacatccacattttgcgactccgaatctgaagaggttgtcgccattgtgggttattcaacgtgactaactcttgtcaacggctaatgcactaaaaaaaaatataataatataaatataattcaaagaattacgggataaataggataatcaactgcaataatttatcagaggcaatttgaaaggttttaaacaagtgttgcttacccatagaaacttgtatgagctagtttttaaaatttattctgatttaaatatattttcttatatttaacattagttctcactgtatttcgccatagcgaagcgaacttgagtcccttgtggccgtccattcgtgtgtgcatttctaatttggttaggcttcaaagagttgcctgagttgggttgatatttgttgtggggtcctgtctgcggggaaatggtgccaaaggaaatggaatatccacacggggcacacacacacactcaaaatatcgaagcacctgagtgtcgtgtgagccgagtcacctactcgtctctcatatgttgtaaatcagtttattgtctaattaatggcggtgcttaactgtgtcgctatttctgctaccgtggttgggcgaacttaattgcatttcgtcgcacagagagacaaagcaaatgccacgggttaaaaactcaaatgaaatgcactttgatcgtgggggcacacaaacacacaaacacataaacacactcacacacccgcaccgaacacgtggcccaaaaggcgggatgagctgcaaagttcttgcctaacttggttatatttttaatcaaaactcatttcacttgattgagtttcgacagaagcctgcaccaggcactggaaaatctagcatgcacgatacatacaaagtaagatgattttcccgctcccaagctaaactttaatttgcggcattaatttattacaccgaactgggacagtttcccatgatggatatgacgcctggctaaacattcttgcatgttatatatatttttgcaagtgtctcggccaggcaattagccgcaggtaagcggagc

SEQ ID NO: 2 - DNA, 1686 bp, Drosophila
atggcgacaacctcttcagattcggagtcgcaaaatgtggatgtggcatcgcaggcccaaacgcaggataatctgcgcatatttttaaagcatttgtatgcggagtgcgtgttccgataccagaatgtcacatacgatacggacgacccatcattttcacttggcccagcaacagactacgattccgatttgccggagaactttagcccagtgccgcgatatctggagaatgccgcgatgaacgagggcgttattgacatgcgaaacgtggacgaggagctggcggagaaggaggagctgatggccaccgtcgtcagtgccacgatggccacaaatcagaaggagaaccgactcttttgccccctgaactttgacggatatctctgctggccaaggactccggccggcactgtgctgagtcaatattgtcccgatttcgtcgaaggattcaacagaaaatttctggcccacaagacctgcctggagaacggctcctggtaccgtcatccggttagcaatcagacctggtccaattacaccaactgcgtggactatgaggacctggagtttcgccagttcatcaacgagctgtacgtgaagggttatgccctctccctgctggccctgctcatatcgattattattttcttgggcttcaaatccctgcgctgcacccgcatccgcatccatgtacatctgttcgcctcgctggcctgcacctgtgtggcctggatattatggtatcgtctggtggtggagcgttccgaaaccatagccgaaaatccggtaagatgcactgagaaaagtaactatgaaaataacatagccctacaagtagctaggcaattatacaaaaccataaacataactaactttcagctgtggtgcattgggctgcatctggtggtgcactactttatgttggtcaactatttctggatgttttgcgagggcctgcacctgcacctggtgctcgttgtggtgagttatccttactcgtctggcaatctggcaattgcctgcacaagtctgcattctttatgggcgacttctgtgcatggcagatgtgatttcctgcagccgctgacatggcaatggttcacccccagcaatttgtctgagagcaaatcgcaacgttggccaactgctttacgtctgcgtcaagttgagatgtcaggaatgtccgttcagatcctgacgccccttcttctttccattcgccaggtctttgtcaaggacacgattgtgatgcgctggtttattgtcatcagctggttttcacccatacccatagccatcgtctacgtttttctgatcaacgtactgcgagtgatcgtgcgaaagttacatccccagtccgcccagccggcaccgttggccatccggaaggcggttcgggccaccattattctggtaccgctgttcggactgcaacacttcctgctgccctaccgtccggatgccggcacccagctggaccacttctatcagatgctatcggtggtgttggtcagcctgcagggctttgtggtctccttcctgttctgcttcgccaatcacgatgtcacctttgccattcgcacgctgctgaacaagttgctgcccagtttagtgaccccgccgccggccgggagtaatactggacagatggccacgaccacgcccagccgagagttgggcgtttaa

SEQ ID NO: 3 - protein, 561 aa, Drosophila
MATTSSDSESQNVDVASQAQTQDNLRIFLKHLYAECVFRYQNVTYDTDDPSFSLGPATDYDSDLPENFSPVPRYLENAAMNEGVIDMRNVDEELAEKEELMATVVSATMATNQKENRLFCPLNFDGYLCWPRTPAGTVLSQYCPDFVEGFNRKFLAHKTCLENGSWYRHPVSNQTWSNYTNCVDYEDLEFRQFINELYVKGYALSLLALLISIIIFLGFKSLRCTRIRIHVHLFASLACTCVAWILWYRLVVERSETIAENPVRCTEKSNYENNIALQVARQLYKTINITNFQLWCIGLHLVVHYFMLVNYFWMFCEGLHLHLVLVVVSYPYSSGNLAIACTSLHSLWATSVHGRCDFLQPLTWQWFTPSNLSESKSQRWPTALRLRQVEMSGMSVQILTPLLLSIRQVFVKDTIVMRWFIVISWFSPIPIAIVYVFLINVLRVIVRKLHPQSAQPAPLAIRKAVRATIILVPLFGLQHFLLPYRPDAGTQLDHFYQMLSVVLVSLQGFVVSFLFCFANHDVTFAIRTLLNKLLPSLVTPPPAGSNTGQMATTTPSRELGV

SEQ ID NO: 4 - DNA, 15572 bp, Drosophila
gccgtaaactatggcgatgccccactgtgcccgcacacaaattccgccacctcgctccgaaatcgtgtgtatttggttaataataatctagttgggcatcgattgttcggccaaaatgaagccactatccgtggcggagtgttaattaatttgcacttaagcgcagctgctggaagcacttgatagaagtgggcatgccggttctcttgggaagttggcttactatagtttagcgttaaggcgttaacttgtggcctttaaagttcttagagaagactttctgcagctgctcaggctgttcattgcggcatctagcataaaatttagagtttgaaagtaagtttctatgaaaaaaaaatacacgtatatataagtataacaagaaaaggaccaaatcaaagtttatataccattgctgtacttatatatttgaatattaaatatacacaaataaatatataccgaataagaacactttatgattaaaagcaacaattattgattaatctacttctacctaaactggtgttgaaactggtataatgaaaaacaactaaggtacatttacttccatttaattttctattggcagctatataataaacagttccgatccaacgtgaaccgacctatcaccatttttgataaagttttacgcagaaacgtaaaaatatctaaaagcatgctattttgtatttgtatttttgtattttgtagagaaaagttgtagatctatatttaattttgcacacatgagcattttaatcagttttgtatacattatttcgaactcttcaccaacagaataaaatgaaattaaaatggtccgatgtcgggggccaaacaaaataaaggcgtattgagttgtgccatgtttcaggtggaaaaaccagctgcaatataattgcttttgaataatgcgaatttcggggggaagtttcttttaccagcacaatataaacaaaactgctcaactatttctcgatatttacattttcagggtccatcagcaacatagatgacgcggagtatcactgcaataagacgcaggtgcgcaaggtcatctcgggggtggtgggtgccgcctcctcggtcacatccatacaagttgccaatttattgcggttattccgaattccccaggtgagtttccattgtgtgatcactaactgttcgactcagtgcgtgcgaagtccaaaggtcatggcataaaagggcagtcctttttgtttttagttcagattttgctttatgctcgcaactacatgtatatgtgctagtttggccaacaaaagtttctcctatttcgtaattaaaatttccaggagccacatggtaactgttgcaatggcttgcaggtctttcggttggctttgccgattcctaagtgtctgcacgtgccactaaattagtcgagtcccgcaggccaactagaggaacatagtgctgcagttgccaagaagtgtacagtagggactctcagcaatcataacaattaatgtaattattttactatatgttcaatttatctttaatatacaattccaaaatgatgattcttagctgctaaagaactgacttacatattaatttcctaccaaaaccaataacaaactggacagatcgcttcagttgagtacttcgactatcagatacccgtcacttgcattaccgcttaaaaagcttgtatctagcattgctcgtatttcaactgcaaacgacattgcagttttttgggtgttcctcatgtagtgactagagcgtgaaaaacgccacaaactaatatccatttctgattcaggaaggaatataacattttccgagtgccggcatgaatcacgtgcaggaagttgaaggagattgagtgcccggttcggctgctccagctacgtgagctggagccaaaagtcaacaacgcgacaataactaagtagccaactgccagatcccttctcgatatatatatatagtatgtactcactactacttggatgccattaaacgcacacgaagtgccagtcgaaggagcagcagccgttccatgcaggcccagctatcgtcccgaaaggacctcataaatcagcaataaacatttgattgcatttggtttgcacgcgtggattctgcgctggcttcgcataaacagcactttcgagcaaattttgtgtgttctgcaattcaaatttctggtcgatagcgacttagtgagtttcgtttaggcttagcggaaattggctgcaatgcaaaatgttcgcaaggacacaattcaaatgacaatgcagttaaaaattccgtaaatgcaatattttatggcttatcgtatttggataacaatgttttaaatgcttgaacaaagcattgctgtcttttttgtttaaagtaaaatttttgccgtcagaagtttgtgcattgaattaaatggttattcaaacattacattttatttatcttgaaaaaagtacaaaaatatgtattaaactcgtagtattatatataaattaaatatattttattattttttgtttttatggactgagtaatagcacttgaattttccaactagtttttcacaatttttcgtactttaataaaagtaaatatttgcatctctagtgtcaattatcaaaagtcaacaaagccaaagctacacaataattttgctataactcgacgctttaaacgctcatgaaaatcaaaagtaattctgattaaataaaagtgagaatgccataaaccataggtaaattagactcagaaataaggtctggtatgagttgcaatgcctgtcttgccatgagcatttgacaagtaatcaagcacttacgcagaagctgttgactaatggtaatgacacttaattagaagccaagtagttcattaaacacttgcagttgacttgccacgccatcgacgatttgccccaggatgcacctacttcctgccccaagtgtttgtgggcggatccttctctaaccaaacggtttatgtgtgcgtgaaattggtttcccggcttgggccaggtcaccacagttggccttttgctgcagttgccacagctttgggtttcgcaaggtaatgccagctgatgttttcttcgacagcagcattgtttgtggtttttggaaaacagcttaagcgagaaaatatgagcgaaaaactgggaaggagcttacgaaaggttctgcagaagcgatagcccagaacgagtgcgaaaaaatatgaaaattaaatggcgaccttaaagtgaaaggggttcttacataaaatattgtagcacacttgccactttgtgccacccaagcaatagcgtttccaactaaaatgttatcccatcatattgtaacccgcctcaccacattttttccatccaggtgtcgtacttctccaccagccccgagctgagcaacaaacagcgattcgagtacttctcccgcactattccctcggatcactaccaggtgaaggccatggtggagatagtgaagcggatgggatggagctacgtgtcgattatctacgaggagagcaattacggaatcaaggtgagtgtttatgtatggaactttgattaaaatggaagaaaggagtgcatctatggctgagaaatggagttaaagaatgagaagctctatgttttaaaagagcttgttaaaattcaaatttaatgtatgttgcttcattttactttggatacttcttggataaaatctattttggataaccattaaacattgaaaagtcaataataagtaagttcaataagtttcagccacttaaatttcctctttttcaaaggactacataaatttcacctaatagggcaaatcatttaactagtaatccttaaacggtggaactttaaaataatgccaagtgccgtttaaaagcgttagcagcactccattatcatatgtttatatccttagccgcttgcagtgtaaacgatatacattttaagtgaacgccttgtatcctatccaacttgtacctgtgtaaacattttacccatcccaccacatgcgtttttattgctcacccacactgcacttgttttcaggctttcgaggaactggaggagctcctcgcacgccataacatttgtattgccatcaaggagaagctggtgaaggattcgggagtggccgaggacatcgcctacgacaatatagtgcagaagctgctgacgaagccgcgggctcgaggtatgtaactggagagtgggaagttgggattgcagagagggatcggaggcgatgtggcggaggaaaagtgcatttccaaccggaacagcgactgcagtctgccagtcaaaatgcaatttaaaatgaaaatgtcaaagcgaaggcgcagtgcaaatgcgaaaggaaagcccttcgcaacgcccgcacaatgaatgcgatccggagtcgagaactatgctaggatttttggctgggcgacggaaattgcgtaaattaaatgaaaatatttaaaaactccctcgccagcgcgccgttgtgccatctgtgccagcgggaaattaaaaagttcacgacaaaacaaacggaaaaagttatttgcaaataaattgagagatagtcgcccagaagtgggcaaactgatacgtccaatactgtagttgtgcaaaaaagtgtgtatttgttatggccaaaaatgaaggtcctgtctattgtccgtggacaaaaagccaggagtacttggcgtccctgaggtctgatgaatgacaccacctattcgacatggcaagcaattaaaaattccagtcagggttggccaagttcaaatttatcggaacgatttttcatcctaaatgaaaacgatttttccacatggcattgccccaatctgcgccaatcatgcgattcagcagcgagataaacaaaaaataaatgtcaatcaatttgacttttcacattttgtgttcccctgtcgaatatcagctgccattcgcagacgccgaaaagaaatataaattaaaaataattaccgcccacagctttgcgcatatcattagtcagtgcctcgaaagggtgaagaatatcagggtcgtgcccgccaataaaaagcacacgggtcgaccaataacaattgacttttgtctggcaaacaatttttgatttacataaatgcgccatcaggagtcgtaaagcagtcggtcgcccaagaaaagggttcctccgccaccattatttattgtgatttgtgatttgacgccgcttacagggcgctagccgcctcgcaacgattaatcaatttgacaaagtattttccctggcatcagttgtttaattttgcatatcgagggttctttcactgctcctggtcctggtcgtggttctggtgggggctccagttgggtccctgaaaaatgatgcccttccggatccgtaactgcggctggtaactgccgccaggggtgaactttacgcttgttcggatccccacacatgtcactccggagctaaatggaatgtgggcggggggccgacatgtttttcctttttatcgccaatgtggcaagctgatgcgatttcagccaggacatgaccggcccccacccgctttagatcactttctggcccggctttaaagtttccccctaatctgcataaatatcctgccgagtgggctcttaaattaaattttatatccctgctaagaataaccgtggttctcgactggtataaacaggctactgtgtacgagaaagccgctcaagtgcatgtctaaggcaaagtgaaaatccaaggaaaatatccttaacttcacaaaagtatcgacaagttttcccgttgtcgccgccgcttcctttgaataagattccctcctcttacttcgagtggcggagcggcagtggcaaatcgataccgggacatgttgaaggggcaaaaaattatggctaagacaaaggacctcttgggcggaccgttaagaagtgacaactgcagctcacgtatcccatacaagtttgtccagagcgaaacaataagggctgaaagcgttggaaaatttggtaagcacctaaccaaaggatagttttagaagctcctgatttccatccgtagaacacaagcgacttaggtgtcggctttaccaattggccattgggaacgttgtttgcttggagtttctaatgatatcttcacactttttgtggactttctgttcgcttcttgggaccaattaaaatattgttttccttgcaaattgaagaacaataccttggcagaaaatctaaatatagtaaagatacgtcgccaaatggcgaacatctgaaaaagtggttgcattacatcaatatatacccttcgtcatgtgtaccccttgtaccccccatacccttgttttatagacttgttttacgcctaacggctatagtaatccaacttaatttatatagcatttgcgtaattaatattcaaagcgaaataatgggctgtcatttaatactataaaaacactttaatccgccctcggaaaggagaacacaagagcagttggcagctgcagattgttttcttttgcgcacaaaagccgctcattcactattgattgcaattaaaattaaattctttcttcctcctttcgcatccttttaatacgccgctgcccaggggccattatcttcggttcggatcaagaggtgcgccaagtgatgcgggcggtgcgccgggcgaatgcaactggttccttctcctggatcggatccgatggctggagtgcccggaatttggtgtccgacgactacgagccggaggtaggtgaactattccgtcagaccggatgacgggccagttaccgtcagccggaaattatgagcctaaatgggcggaacaactcggtttgattaatgactcggatttcggtcacatactcacgcacgcacatacgagggcccaaccccattacatgataaccaaaaaattataaatgatggcggccgaaagaacactttcacacgccctttcccatgatgaattatggttcaatttggattaatcgtgcctttgtctgtgcgtggctaattaatttgtctaagcccttcaagcccagaaatggtcctcctctctgatcaagctcattaagtatacgccgcgtgtgtcttggtgtcatcaacaggtggaaggcacgctgtctgtgcagccgcaggcgaatccggtgcgcgggttcgaggagtacttcctcagtctgacggtggagaacaatcaacgcaatccctggtttgtgggtaagtgaattaccgattaaaattaagctggtgttcattaatgctctgatataagtagtcctttattagtatcccctttcgctaaatggttatcttgatttcagaattctgggaggatcactttcagtgccgatatcccggcagtacgagcactccgtacaataactacaccaaacagtgcaccacaaaggagcgactttcacgccagaacactgacttcgaggaccagttgcagtttgtcagcgatgcggtgatggcatttgcatacgccctaaggtacgattaagcttattttggaagcaacccactatcattttaaacgtattaagaaaataatagttcttttgatcaacccttttagtttttatcaacctatggagtagcaataaataaaatgtaatgtgatttcctctccttagggatatgcaccgcgacctgtgcggcggaggtccttcgctctgcgaggccatgaagccaacgaagggtgcagacttgctgaaatatttgcgaaaagtggagtttgagggtgagtgagtaatagaagccgtgtatccacttttgccggataaaagcaagttaaattaacggagtaactattcccgggaattttcaaaacaggatgtccgactgactcagatccctttgctctcgcttagttccttcagtcggcaagtgatgcgcacatagcttaagtggaaatttcctgccaacccgtccttgcagttgggccaaaagccccgcacacacacttacacacacaatggcatatctcagcctgcgagagtcctacaaggcgcattggccatgctttcgagtggaaaattgacttgcttgtcatcgtcattgaactcgattgaaattcaataaattacacagacagacggacgggaaggagccaaaggccctgactgactagcgcagattgtcaattttctgatagggcgagcgggcaagcggcaaagtcggcgaagtcgtctctggcaggcgtgaaaccataaacccatttaactcctattcgatcaatccctccgcaggcctcagcggcgacgagttccgcttcgacgggaacggcgacggtcccgcccggtacaacatcatccacttcaagcagtcccaggcgggacagtaccactgggtcaaggtgggcgagtacaccgagggcgagctgcggcttaatatgacgggtaagataaagcccccagtaggaaatacttaaaagtataataccaggaacccttcaacattaagtttacctgactgaattcgtgcatccttagtctcctgtaacctaatgtattcgtgctcactgctcctcatcaatactaattttgatctcattatcccgctaacccagaggtgaagtttaagcggctgagtcccaagccgccggagtctgtctgcagcctgccatgtcttgtgggtcaggccaagaagtacgtggaaggcgagagctgctgttggcactgcttcaattgcacaacctatcaagtaagtgaagcccatctgaggccagtaatttatttgttggcccttcgaatagattgaaatgtagcgccaagtgaattattccggaactaacgcgttgacgggagatgggaaaaatggggcaaaaacaattaagccatcaggcctgaaaggggctgcaagtgaatggcaaacatgccgcctttgtgctcgccccatccatttatcaagtgttcctttgtgcggtgcgtccattgcagatccgccacccggatgacgagacccattgcaagctgtgcaagctgggcactcttcccgacgcccacaagcagtactgccgccccatcccggagatatatttgcgtccggagtccgcttgggccatcggtgctatggcgttcagtgcgaccgggatcttagtaacgctcttcgtaatgggcgtatttgtcaggtgagcagcgcatacaccgtgataaaaacgggtataggaaattacttttaataatatttaatagttattaatggcttttataaaaccatttgaaacaattcagtcttaagatcgaacatttaacaatgaaatttgctttctaaatccaaaaacccatcaggatgttatattccttttctattaagaccatttttaataatacatagtccaatattatcataaaaccttgttaatgtatatattttctcaacttcaaataatttagacaatatataatactttaacaataattaaataatttgaagataaggtaacgggtatattatagtcaatgcattcgttcttgtgtttataagtatagttattgttatactagtgacaagctaaaggatctagatcaagctgatctgagtgccaaatatttcatgagggcctgttttctagctatgtttttctctgactgtatttattggcacacaattgtccgcttgcatggatatggaaagcaattaaaaagtttcaccctttccgggcaaacttcgccacaaagttaaccggcagacacataaaaatgatgcattaattggcgcaagaaaacgtcgtcgcaagtttgaaactgaagtaacgcctttccctccttcaccttccacccaacaggcacaacgacacgcccatagtgcgtgcctctggtcgggagctgagctacatcctgctggcggggattttcatgtgctacggtgtcacctttgccctggtcctgaagccgaccaacatagtgtgtgccattcagcggtgagtgtgcaaattgccgagatgatgcgtgtgaattttcctccgaaactccctcttttccgcttttccgcttccacacaggtttggtgtcggcttctgcttcacggtcgtttatgcagcactgttgaccaaaacgaatcgcattgcacggatcttcaaagcgggcaaacaatccgccaagaggccctccttcattagtcccaagtcccagctggtaatctgtgcgtgcctggttagtgtgcaggtgagtgtgtggagtggtctggtggcgctcctggcggtgaccgacggggcggatgtggaatcgagatgccctgcgatgactccgtgtcattctttccattcactccattcgcagatactcatcaacggcgtttggatggtaattgcgccatcacatgccatgcaccattatcccacacgcgaggataatctgctcgtctgcgactcgtacatcgacgcctcctacatgattgcgttctcctacccaatcttcctgattgttatttgcacggtctacgcggtgctcacgcgaaagattccggaggctttcaacgaatcgaagcatattggtgagtaattgagctttttatttccagaagagctataattcggcgtaattggcattgtattggaagggtctgtacaaaaagccatgcatgggtttgcattgtctataacctggttcattatagcagcaatgctattaactggtttatttagtgcataaaatagcacaacatgtatgaatgaactccttataatttagttatgtgttttgtatttgggtaatttggttatttcgaaacaatacacgcatgaaatatttataagtctatattttatgcattgcaacctcagagttctagtgcagaaatgttttataattatgaagccataatgcccataattggccactttgattgattacttaaccctattgttacaggattcaccatgtacacgacttgtgtgatttggctggcttttgtaccgctctacttcggaaccgccaaccacgttccgctgcgcatcaccagcatgtcggtgaccatcagcttatccgccagcgtgaccatcgcctgtctcttttcgcccaaggtgagtgagtccggatagctgggagtgggttgggcttcggcttggggggattcatatccacacgggtcctctgtaaattgattggtaattgcgttatgcattaattattgcgcatttatctggcgaccgttgaatgatttttggtgccacagtatgcagaagccatcggcgattttattccatttcattccgtttattcaggacgcgtggacgagtgtttcattaaaatgcaataagacggaagatgaggacaggcggaagccaagggtttggcaattcaacaaccggctgcatcgattgcgatgtgttgcttccaaccatattgtttttaatgcctacccttcctcttggtccatattccttggtccttgcccatttcatgatgtttccccgagatgaagcttaaatgtcaacaagccatgttctcccacggagctgaactggtcatgatctcctcccaaaggcgcgcgtcctttatgttggcatactcggtccccatgccaacatattttttaatacgccctgctattagctattaagatgcaagtaaactgccagacaagccaaatatagccagccagttgagttcatggactagatgatgcagcatggcaaagaagctgtttaccccgatattaaacgtcaaggaggaagcttacatttaagcactgatatcttcattacacggaaacacgacctttgacagcaatgtgcaatgtgaaacgcaggaaaggaattttataagaaaatgtcgaatagcttgtttgattattttttttgtataagtattccaagcatgaaagttagatcagaaaatccaagttatattggcaaataatgaaagtctcttaattgtatggctattaaaggggaaacacttttctagttagtttccaaaggcttccatataacacttaaagatgccagaaaggaccttcgccagtgtctatgccattgaagagcaaggaggtagaaatagtaaatcagccagaaacttgattagcaacggagcggagctcccacaaccgcacacgtcatagttcttggtcccggagcggagcaagctacagtttatggtctgtctgcatattccgggtgcaaagtagaacaaaacccggggaggcgaagggccgtaaacactcagcaaaaggctattattaaatgtcggagtggagcatacttcttggcccagtggctgctaaccgggccaactgtacgctatcagatgtcacctaatgcacggttggtttgcgacgaggaaggaacactgtactgcgcacacggcaaatacagtgtgcacaagcacacgaaccgcaccgtacaccttgagccataaaaatgcaatttacaactggttgtgtctggcaaaaggaaaacaataaaaggctgccatgaatgcggcatgccacacaacaactggggatcaccggaccaagaggcaacaaactaaggccctggcgcaaaggtgccggcagccacgcctccttccgcaggacaaaggctggcaaccgaggtggcaagccattccgacttccgactgccacgcgccctttctgctgtccgtccggctctgccgcagtttgttttcgaacttgccgcgtttgtttgcggtgaaaacaataacaaggggcgtccaaatggcagccaaacaatgtcaaagcaaagcggaaatgacccaccgtgcaggctacgtaacagtacgcagcgtatcgcaagttgaaacctggagcactgctcgcaatttgcgctaaattttcactaagcgttttatagatggtgccattctagtaaggagtatgtgtgctctgaaccaggaactcgctcacgtggccaaaaacaaattcgatttggctttaaatatatattagaaagtcaagacacctcaagaaattggtgggaaagtgttttcatgtattgaatagtaatcttattagcggtattttttacacctcactagtagagtgaaagggtagactagtttcgttgaaaagtatgtaacaggtaaaaacaagcatttaaagtataaagattattgattggaatcaatagcagatacgatctgaccatgtccgtccattcgtattaacgtcgaaactaataagttgagataaagcatactgattccagagacgtagacgcagcacaagtttccgtattcaatatccgttccggcagatctttctatagtcggggaactcgactatagcgttccctaaattatatttaaattaatcaaacaaaaatgaacgaatgcgtgaacgtgttatgatttaatccgtctattacattgttcattgttatattattcttaaagtgtaagtatggtaatatggggctcaggcgtgcacttctgctccctgtaagtggcccaagtcgttggcctttgctttgaccacattactgctggccgtagaagcaggaaatggctaatgacacttgaatttggattaggaatgggacttggtggtgggcgtggcaggtcacgcactgacttctaatcaaagccgtaagataagccatcttggggaacaacgaaattggatatcgcctccaaatagctattacacacaatgggtcgttcgattaatgcctcgaacgggaaattaacctaattggaaagacgcactgcttttctgactcgaccctacgcttgtgtccttgcagctgtacataatactcatacgccccgagcgcaacgtgcgccagagtatgatgccgcctcgctacggcaacatgcaccgcaccgctggcacaggaccctcgtccatgatggccgccgccgtggtgaccgccgccacctgtgcccaggaggagaagatccagaagcatatcactcccacaaacacaggtcagtaattaagggatatcggttaacgagtcccgggtcagtaagcgtagcgctcaaaatacacacacttcgtgtcgggcaaatgtattattgacatatgtaatttgctgttgaatagtgcaattaagaggtataacagttgcttgcctcgttaatcattatcgatcaattaatcaaattattgaaagtgagtcgattttatctcctgacaatgtattaatcgtattttgcaatgaatttatatcaattaaattatattactttattaacccattgcaccagctgtacctatctctcgtattcatttttaatttttgtggaaatgcttcaattaattgagaaaagtttatcataaattgggtaatatagcaagtcttaaaataactcaagctgtaaaagctgaacagttttatcaaagtaatagttaggctgacaatcaaaaggtatatccttcttaatttaattgattttaaaatgactaggataaagaataaaactgaattttttccattcactacccataacttgcagaaaactcgctaaagacgaagaaattgtgcgaaatggccactcagacaatttccagtataatcacgtcgctggacatcaatgcgtacaatcaaataccatatgccgatcaatatgtgccaaacaatgccacaacggccacgaccacgcccacagataagggcagtggcaacggcaacagcaacagcaatagcaatacgaatggtagtagcaatagcaacagcaacagcaatggcgatggcgatgtggcaacagagcaagtcgtggccaacaataataaaatcaatcagcgacaacatggccagccggccgtggcatttgccatcacatcgactaacaatcacataagcggcccagcagcaaccataacaacaacagcggcaactggcgaaacaacaactgaggcgctggtggctacaataacaactccattggcaacggtggatggcagcgaaaccatgtccgtggctcccaacaatgggcatggaaacaacgggagccaacgtccgccggtcctgcaaacaaacttatagctaaacgcgcaacaattgcagcaacagctgctgaaggagcagcagcgacaacaagccgagctgcaaacgcaacatccgcagcagcaacatggaacacaaagctcttccagcgacaccgccagcacgggcagcggcagtgcggcgaagaagcgggccgcaattcccgtttagctgcccccggagattcgagattctcgcaaccatacgtaagtagaggaaagtgtctgttgacccaagcgattcccggcatcagtctagggatgcggaaaagcagacaagaggagggcaggaggtcgtgctaggacgggactaaattgggagcagctgggccacagaaatatcttcagatcttagaaggcgaaataattcatttaccacttttgttcgcttattaatttgagtgaattctggttataccttacccccatagacacaaattatcttaacgttcttttatataagtttatcgatagctgtacaacaatgtatctcaataatgaagatattcctgtggcacttaaggctttcttcagattttaacatgcacgcaagagtcataagtaagtaagagtcggctgatcaaaaaccttcgcaactcttcccaaaaacaaatgtgtttctccattt

SEQ ID NO: 5 - DNA, 2456 bp, Drosophila
ggtccatcagcaacatagatgacgcggagtatcactgcaataagacgcaggtgcgcaaggtcatctcgggggtggtgggtgccgcctcctcggtcacatccatacaagttgccaatttattgcggttattccgaattccccaggtgtcgtacttctccaccagccccgagctgagcaacaaacagcgattcgagtacttctcccgcactattccctcggatcactaccaggtgaaggccatggtggagatagtgaagcggatgggatggagctacgtgtcgattatctacgaggagagcaattacggaatcaaggctttcgaggaactggaggagctcctcgcacgccataacatttgtattgccatcaaggagaagctggtgaaggattcgggagtggccgaggacatcgcctacgacaatatagtgcagaagctgctgacgaagccgcgggctcgaggggccattatcttcggttcggatcaagaggtgcgccaagtgatgcgggcggtgcgccgggcgaatgcaactggttccttctcctggatcggatccgatggctggagtgcccggaatttggtgtccgacgactacgagccggaggtggaaggcacgctgtctgtgcagccgcaggcgaatccggtgcgcgggttcgaggagtacttcctcagtctgacggtggagaacaatcaacgcaatccctggtttgtggaattctgggaggatcactttcagtgccgatatcccggcagtacgagcactccgtacaataactacaccaaacagtgcaccacaaaggagcgactttcacgccagaacactgacttcgaggaccagttgcagtttgtcagcgatgcggtgatggcatttgcatacgccctaagggatatgcaccgcgacctgtgcggcggaggtccttcgctctgcgaggccatgaagccaacgaagggtgcagacttgctgaaatatttgcgaaaagtggagtttgagggcctcagcggcgacgagttccgcttcgacgggaacggcgacggtcccgcccggtacaacatcatccacttcaagcagtcccaggcgggacagtaccactgggtcaaggtgggcgagtacaccgagggcgagctgcggcttaatatgacggaggtgaagtttaagcggctgagtcccaagccgccggagtctgtctgcagcctgccatgtcttgtgggtcaggccaagaagtacgtggaaggcgagagctgctgttggcactgcttcaattgcacaacctatcaaatccgccacccggatgacgagacccattgcaagctgtgcaagctgggcactcttcccgacgcccacaagcagtactgccgccccatcccggagatatatttgcgtccggagtccgcttgggccatcggtgctatggcgttcagtgcgaccgggatcttagtaacgctcttcgtaatgggcgtatttgtcaggcacaacgacacgcccatagtgcgtgcctctggtcgggagctgagctacatcctgctggcggggattttcatgtgctacggtgtcacctttgccctggtcctgaagccgaccaacatagtgtgtgccattcagcggtttggtgtcggcttctgcttcacggtcgtttatgcagcactgttgaccaaaacgaatcgcattgcacggatcttcaaagcgggcaaacaatccgccaagaggccctccttcattagtcccaagtcccagctggtaatctgtgcgtgcctggttagtgtgcagatactcatcaacggcgtttggatggtaattgcgccatcacatgccatgcaccattatcccacacgcgaggataatctgctcgtctgcgactcgtacatcgacgcctcctacatgattgcgttctcctacccaatcttcctgattgttatttgcacggtctacgcggtgctcacgcgaaagattccggaggctttcaacgaatcgaagcatattggattcaccatgtacacgacttgtgtgatttggctggcttttgtaccgctctacttcggaaccgccaaccacgttccgctgcgcatcaccagcatgtcggtgaccatcagcttatccgccagcgtgaccatcgcctgtctcttttcgcccaagctgtacataatactcatacgccccgagcgcaacgtgcgccagagtatgatgccgcctcgctacggcaacatgcaccgcaccgctggcacaggaccctcgtccatgatggccgccgccgtggtgaccgccgccacctgtgcccaggaggagaagatccagaagcatatcactcccacaaacacagacgaagaaattgtgcgaaatggccactcagacaatttccagtataatcacgtcgctggacatcaatgcgtacaatcaaataccatatgccgatcaatatgtgccaaacaatgccacaacggccacgaccacgcccacagataa

SEQ ID NO: 6 - protein, 738 aa, Drosophila
MVEIVKRMGWSYVSIIYEESNYGIKAFEELEELLARHNICIAIKEKLVKDSGVAEDIAYDNIVQKLLTKPRARGAIIFGSDQEVRQVMRAVRRANATGSFSWIGSDGWSARNLVSDDYEPEVEGTLSVQPQANPVRGFEEYFLSLTVENNQRNPWFVEFWEDHFQCRYPGSTSTPYNNYTKQCTTKERLSRQNTDFEDQLQFVSDAVMAFAYALRDMHRDLCGGGPSLCEAMKPTKGADLLKYLRKVEFEGLSGDEFRFDGNGDGPARYNIIHFKQSQAGQYHWVKVGEYTEGELRLNMTEVKFKRLSPKPPESVCSLPCLVGQAKKYVEGESCCWHCFNCTTYQIRHPDDETHCKLCKLGTLPDAHKQYCRPIPEIYLRPESAWAIGAMAFSATGILVTLFVMGVFVRHNDTPIVRASGRELSYILLAGIFMCYGVTFALVLKPTNIVCAIQRFGVGFCFTVVYAALLTKTNRIARIFKAGKQSAKRPSFISPKSQLVICACLVSVQILINGVWMVIAPSHAMHHYPTREDNLLVCDSYIDASYMIAFSYPIFLIVICTVYAVLTRKIPEAFNESKHIGFTMYTTCVIWLAFVPLYFGTANHVPLRITSMSVTISLSASVTIACLFSPKLYIILIRPERNVRQSMMPPRYGNMHRTAGTGPSSMMAAAVVTAATCAQEEKIQKHITPTNTDEEIVRNGHSDNFQYNHVAGHQCVQSNTICRSICAKQCHNGHDHAHR

SEQ ID NO: 7 - DNA, 9400 bp, Drosophila
cagttagttcctagttaacaagtgaggtttggttgaaatctttctttgctatataggtatttcatttccgtatgctgtatcggttttgtaaaataataaagcatttcgcgagctctctctctctctgtatctcaaaaatataaagtaaatgcccctatgtgtgtgcttaaagcatctagattgatgaaaatgtacacttcaaatgcttcgctctggtttgcttacaacgtagctgaaatgcagcaacaaaatggcaatgtattatttccctttacttcttatattcctcttgattcgcagttggaaggaattttagttgtataggtggaaaacggcagctggatagcaagaaatgacaatctttcaaaacgtaggatatctttttggtttatgaaacacaaaacaaatcttaagcctgtgtgtatatatatatatatcttacgagcataatcagcgtaaatcaaaaacaattgatttcttacaaaatacataaaacataattcgcctgaattctatatatcatgtacatacagttcctagatcttatacatatacctacatccatatatatatacttgattttctggttgtttaaattagtttttaagtatttaaaaatggcatgtggtgacatgtattacaatacatcatacatatatggtacatacatttatatttaatatcgatttccaagttggtataaaatgcatgcaagtcgaagggcccgattccaattccaattccaaccccccatcgctcgagttttggttaagcttgcacggcaccgcaggggtatggatgtgccctatggtctaggttttagttatttcatatacatttataaagttttgggattttcgaatcactgcacgtatagcatgacagcatgttgtttcacacaatgctccatatttcgactaacgactaatactaggtatagctagagatcctaagctacaatttttgcctaagactgttccgggggagttgcgttaactgatcacttagccagtggttccagataacatcgcaccgtgttgttctcatcgagcatggccgacaggtggcgctgctgatggtgcggaggatgctgatggggatgcggatgggttagctggtggggatgcggattgggattgctgtgtgatgtatgcgacgacgatgatgtggtggactgtggtgacagtttctgtagctgctggcgcttctgcgcgggcgtctgattcgccggcggcagcggtggtcccgagttgccgtgaccgaatagctcatttaccgccaaacggccgcctggcgacttggcattcagtgcttgctgctgctgctgccggaatgcgccacgcagggagccctcaccaacgccgccgctaaccccaaaaaccgcaccgttgtgctcgggttgcggtcctgctcctggtggcaaagccccgtagtcaagaggcgctccatgtttgcgcagctgacgtctgtaaaggggataaatgtaattttttcgtaacgttgatatagtcaaacattagaagtacttactgaaaccgccgcttaaaatcctcgtcctgcatcgccatcagacgacgcatccgctcatcgctctgcggtggcaatccatgagcatcatcctccaagtcgctctcgtcctcctcctcatcctcatcacagacgctgtcgtgcaattgctccgcggccgttgcctcctcatcctcctcctcgtcttcgtcgtcatcgtcatccgccgtgcagcgtcgagccgatctttgctgagccagcgactgttgttgctgctgcttcttgagctgctgctgttggctcctggacgagacactgccgccactcaggcttccgccgccgtaccgactaccgccggcggccaccgccgctctcatgttgttgaagacgccagtgccaacgctattgttgtacacctcgtccacatcgaagtcacccacctcgtaatgctgcacatccgagttgcggttgctgaggatctcctcgtagaccggcccaccatccgcgccgccgacgctgccttggttgtagtaggcatcgcccatgcccagatcacagttggaatgcttatttctatactggcgctgcataaactcctgctggtactgcgccatgtgtggcggtggagcagggagctgctgctggctaccagctcgtcgttgcaggtgcaacaggtgagcatgttgctcggcctgctcctcgtccgaggagagttgctgctgctgctgctgttgctgctgctgatgtagctgctggcgacgcaactgttgctgctgctggtagtaggcagccgcattgccagtggctagtggtgggtccaacgcctccgcgtattgcggatagcctgttggctggccaggcttggtcttcttgtacgatggatagaaaagcacctgggaggcggcggccgtgcgactgtgcagagatccactaggcgaggcgggaactcctccggcgcccctcttctttttgccattgtggccgctgttcggcttttgagtccagtagaatacctcgtgcgcctgttgcggcgatgatgcagcagcacccgcattattgtagtactcccgcggtgttttcaatcctcctgttccagttgatggttgcttccagctgtagtagtccggctgatggtagtaagactcgcccaaaggtccctgttgctgctgttgttgttgttgcttgtgcgcaaaaatcaggtgtgtggacccggcagagctggtgggtgaggcatgaccagtggagcggagagtgctacctctttcgagcacaacatggccaccaagggtctgcggtggagcctgtagtgtgcccgtcattaggccactttttagggttcttctttgctgggcctcgttcagttcacaatcagaggtggctcccataatggcatcctctgtgatgggcactggtgtctgctgttgctgctggggatcgtcatgcgcctcttcgctcactcctaacggcagcttgggcttcttggacgtggagacgctgcaaagggttccggctgtgggtccattgccggtaacaatgcccgaggaaattgatgttttcgagcagcgcaagcacttgggcagccaagcgtgctgtctcacatacttccgatactcccgccggatcttttcgttttgaatgcaatggaacacgaagatatagagccccagcaatgtgttgaagcagatgaagcagtatccatacacatcagccgtgtcatcgtccattttggctcctcgcaaatagaagtaggccgagcaccaaacagcgctgagcagcaagaggaacacaaaggagcagcgtatgtcgaacctaggatttgaggtacatgggcatcgaaggatctttaaagtgtatatggattttcaatatcttaccgcacgctagcgaggcgagtatgttccttggtctttagacccgtgcgacttttgcggcacattataatccaggagaggaatgtgtaaccaatggcagcctgtaaaagtgaattaatttaaaatggtaactgcgcttttgaagcttcatctcatattatgtaacttaccacaaagaagacaagcactggtattacaaaggtggcataaaacaaggcattcgcctccatcagcacgcaataatcgttttgggtataggtgctgggatcgatgaccagcgagatggccaccacgctcagcgacagtccgtaggacaagaggtagtagcagttcaccttgggcgtctggtccacctccagcaggagctcgtccgaggtgagcgttgagtacgaatggaaggctgcagaggcaaagggttagggctgcaaagtgtagatgaaattcggccttcttaccttcgtaacagaaccaggcggtgcccgataggatggcacagtgtaggaaaatagtaatgaagccgcagaaaatgcttgtttcggtctgttcaatgcccaggagaaagagcagctcgatggccaggaggcaaaggtaaatgctggtatagatcgaggtgcgcgcggactggagtggacagttaaagagaagacagagtgaaaagttaatataagttcgagaagtcagtgcaaattttttctttaagcagcaccagcagaaggaccctaaagattcgatcatcagggagcttttagacattttaaggaaattgataatcttaaacgttttgaagaataggtgtcagatttgatagtcaaacttaatttagaacttgatttacaataattttggtgggtggtggtgaaaatccaaagactaagagtaatacgaatacgaataaaacaatgaacagaacacgaaacaagcacaacacataggtaatatacatacaaactaaatgaacaaacacaaaatgcaatatttacaggacaaaattagcaacatttgtatattttattaattaatgaaatacaaaagaaagtcagaagtgttctaggtatttagttgtacgatgtctatgttaaatttgttaaacaatcaatgcacataaaaggggttatggtatttcaaaaatgattaaacgattaagtaaaacatgccagagtgatgatttgtaacaaaaagaaaaatgagtctatcatatgaagatatttcattattggttttgtgtgctaatcttaagctatgacaaattactacgatacataaatataaatgggagtcttcgcgtgcaagctgttactgggacgcaacagtgatcatcgctgcccagcacagcttttgagtcttatctttgaatcctgccagagagaggttcattaacaatttaagttacttaagcattatatcacatgtgtctctcggtcataaatacatatgtctagaaagcctagcctagcctaaaattgtgtttatctgttttttcaccaccaccaccacttatattgtaagtcgtccatgttggcctgcataatgatgttgttcgtgttatccaatccattgccgtccacattaaggttgtgattgcggtgcggatgtggctgcggctgctggccacgctgctgctgctgctgctgctggacatgctgctgctgcagatagttgtggctgatgttgaggttattgctggcgttgctggcctgaactgcatgttgctgcagtgcagcggctattgaggcagcagcagctgcagcagcagccgtctgctgaccgtgctgatgcagattcagattcaagttgttcatggcatgttgcatatttcgctgcggctgattggacagcacaacagcagcagcagctgccgcaacaacttgttgttgctgttgctgctgctgctgttggacattgtagttcagattgttgcggtgtgagttgcggatggaattgtgttggataaagttcgtgttcccatgactgggcggcggcacattggactgactggttggcgtggtcagggtcaaggactcgtgggtctggtcgcgaatattgttttgctggcgtctgctgcccgaccgctgatgcggcaagggattggagccgtttcttaccttcacaaagaccccattgaacagcttcagcgttagcagggcgataactatgaagaccacgcagatgccgatgcttatgtagatgaatatgcgcatgtttccatcgaacatggtgaacaacgaatgctggtgctcatccacaacgtccattagtatggcaaagtttgtcaggtggttgcaactgcagacgctgtgcgtgcggttagtggactccagactgcatccgttggcagaccacgcactaaaacaaaaacattaattcgtataaattattaggcatatgagcatatgagtcttactggtcaatatagttccagaacacgcaggtgggattcgttacattctcggtcttcagatgtttcagtgtcagggttatgggctgggagagttgtatgtgacgccccttgcccaagctggccgagatcaccttgctgttcaggatgcgtaggcgctgttggatctcccccgcgttgacatcgctgtcgttgctcaggatggctgtattgcgaactaagaaaacatttagattatactattctaacgtttttcagttctctgtggacttaccgtaactgcgggagctcttgagatcgaagtgatcatagctgggctttagaatggattccaggcgatcgaaggcggcgaatacaattcgcaccagaccgccttcactattatctattagagcagctcgtggcagctcaatacgatccgaactcaagggccactgatccgaatctgggaagaccacgctggactggatagtcttggtttccagaactcgaacggagagcactatggtgatatacagttataagtattttgaaatgcaaacaatgcaaacatttagaactcacatatatttttgactttttgcaccacgctgcgctccctgatgatcgtatccgccagcagaaaggcattgtattccaggccagttagcaaggatgtggctacacgcatttggtcctccggattgagatccaaccacgaggacagctgcgattcgtccagcaggttggagccggttttgaccacacaatgcaacaactccatgatcatagcctcgcgctgtcgctgatccgggaaggtctccttgtcgtgcatcatcttctcggacactgtttggataatcttcgtggtgaccaacatgtcgccgccgtagagcgttttgctactggtcacttcggacatatcgttggcgatggagatcaaggaggagtcccgctggtttactcgcatttccagattgttgagccaaaggctgcggcattgcgtcagatcaggtgtcgcgggatgccaggtgggctcaaagttgcgcagacgctggtttaccttgtgggccatgctcaccggcggctcgcagctgctgctgttgtgcagacagtcgccaccgctgggtgccggagttgtcgaactgatgtcatcatcgtactcatcgtagccggagtcgggtatcctcttcattagaacgcaacgccacttggcgatgccggctgctccgccaggacagggctgaacattcacatcacccactcgagtcatgttccagtacaaattgcgggcatgagtggggccgcaaaacaacttggactcatcatcgcctccggacatcccggctgcgttcaaattaatattgttgatggtgcgcaccacgctgccgttcccggggacaacggatccactggccgcagtgcccggtgggcggttgggtgagctctttgtggtcagtagggttccgtcatcagttccggaacctccgacgcccgtgagtatcctcgtgttggatggtgaagtggcattaccgccagccggcagcttgctgctcggcttggtgggtgaggcagtgtcttcaccgtggtggttgtggtggtggtgcagttgcggcggcggtggcagaccatcatggcggccagccggatgcttggtggtcgtcgtggaggtggccccacccttcaaacgtccaccgcccacggctgtcgtgctgctcgagggcgtggagtgcgtgacggcggtgtgttgcggtggtacgttgaacaggccgggattcccactgattcccaccactccgggaagtgtgggaagtctcggcgggggcggcgcacccgctccaaccccgggcggatggatcagtccactgccgttgccaaagatcggcggaccattgctcagcacccatggcggcggactgggcctgttggtcgtcgtcgaagtttgggctgcacttatgcactggtagtgtgcctccagatacttgtgggtaccgggacagggatccccgaacatgctcgtggctgccaacacgccgcagctctgcttgtgggcacatctggaaaatgggaaaaatacgcgttcatcagtaaacagagttgggtaattttcacatatttaagatgcttgattgattgacttgtgttgaaatagtttattgatattcgcaaccagagtatgaaatttccaaatgacatgtttaatgatttgaagatccaataaactttaaaagatgtattaccttgagttcagtacgctgagtgacttgggaaacatgcagttaacactccactccacattcccgtggtcattgcagatggtaatcgagaagcggccatagttggcccgaatgaggttgatcacatcgccgggatcgcactcgatggtcagtttcttaccttcgcaggcgtaggcggtttggtacttggacactgaaaggcgaaggcttcataagtcacagggtgctgggcagggtatgggtttatatggacatggtatatatatatggcatataaaaagaaattttttggttagcggcgatgattgttgtagtttggtttggtttggattggattgttggtgggcctgcaaagacacttacgatctaacgatatatgctcataggatattgacaatatggttggtagcatgatacgcttttacactgcctgggatatacttagtaatgctgaggttgatggtggagtatgtgggtcgttagcttggtagcaagtgcaatagtagtcataaataccaaatcctgccggcccagatcacgaatcatcgatcgtccatcattggttcttatcggcaatgctcattcggcagtgtttcactcggtttgaagtattcaaactgaaagggaagataacatttataatgtttggtattattattattattattttaaggcacataactaataacttaagacatgttgtatttcgttagaaaggaaaaggagaactatccttttcttttattgatattggttccatttaatttacttgtgcaatatcacatcaatgttgagtcaatctaatgacctggttacagtaaatatcaaaagtgtagattctaataaatttaagttattttaatattcagaacctctttgtataactcctattaaaacactatataagcaatgcaaatatcaagaaaacataattaattgtaagaattataaattgcatttatatatctttaataattaaaatggtcttatatttatgtatgatgatatccaggccaagcacacctatgtacatatgtacatacctcttatgtatttccgtttggagtcatattcatgaaagttggactcaaaagtaccattcaacttatgtatctgaaaggtagagaatccattagataattgtttacatattgactccttgggcaaacacgaacaagcaggcaaaagacaaatagaagataagaagatggcatggggcaggggagggggtagggtagggagctaagaatacacacccttctgtgtacacccacactgtggttgtagttgttgcatggccatcgattcgtggacagaacaaagacccgttttctttgtacacccgatgcacactattcacgaacatatatgcatgtggatgtaaatgtagagaaaagttgctgcagctgcgc

SEQ ID NO: 8 - DNA, 5718 bp, Drosophila
atgctaccaaccatattgtcaatatcctatgagcatatatcgttagatctgtccaagtaccaaaccgcctacgcctgcgaaggtaagaaactgaccatcgagtgcgatcccggcgatgtgatcaacctcattcgggccaactatggccgcttctcgattaccatctgcaatgaccacgggaatgtggagtggagtgttaactgcatgtttcccaagtcactcagcgtactgaactcaagatgtgcccacaagcagagctgcggcgtgttggcagccacgagcatgttcggggatccctgtcccggtacccacaagtatctggaggcacactaccagtgcataagtgcagcccaaacttcgacgacgaccaacaggcccagtccgccgccatgggtgctgagcaatggtccgccgatctttggcaacggcagtggactgatccatccgcccggggttggagcgggtgcgccgcccccgccgagacttcccacacttcccggagtggtgggaatcagtgggaatcccggcctgttcaacgtaccaccgcaacacaccgccgtcacgcactccacgccctcgagcagcacgacagccgtgggcggtggacgtttgaagggtggggccacctccacgacgaccaccaagcatccggctggccgccatgatggtctgccaccgccgccgcaactgcaccaccaccacaaccaccacggtgaagacactgcctcacccaccaagccgagcagcaagctgccggctggcggtaatgccacttcaccatccaacacgaggatactcacgggcgtcggaggttccggaactgatgacggaaccctactgaccacaaagagctcacccaaccgcccaccgggcactgcggccagtggatccgttgtccccgggaacggcagcgtggtgcgcaccatcaacaatattaatttgaacgcagccgggatgtccggaggcgatgatgagtccaagttgttttgcggccccactcatgcccgcaatttgtactggaacatgactcgagtgggtgatgtgaatgttcagccctgtcctggcggagcagccggcatcgccaagtggcgttgcgttctaatgaagaggatacccgactccggctacgatgagtacgatgatgacatcagttcgacaactccggcacccagcggtggcgactgtctgcacaacagcagcagctgcgagccgccggtgagcatggcccacaaggtaaaccagcgtctgcgcaactttgagcccacctggcatcccgcgacacctgatctgacgcaatgccgcagcctttggctcaacaatctggaaatgcgagtaaaccagcgggactcctccttgatctccatcgccaacgatatgtccgaagtgaccagtagcaaaacgctctacggcggcgacatgttggtcaccacgaagattatccaaacagtgtccgagaagatgatgcacgacaaggagaccttcccggatcagcgacagcgcgaggctatgatcatggagttgttgcattgtgtggtcaaaaccggctccaacctgctggacgaatcgcagctgtcctcgtggttggatctcaatccggaggaccaaatgcgtgtagccacatccttgctaactggcctggaatacaatgcctttctgctggcggatacgatcatcagggagcgcagcgtggtgcaaaaagtcaaaaatatattgctctccgttcgagttctggaaaccaagactatccagtccagcgtggtcttcccagattcggatcagtggcccttgagttcggatcgtattgagctgccacgagctgctctaatagataatagtgaaggcggtctggtgcgaattgtattcgccgccttcgatcgcctggaatccattctaaagcccagctatgatcacttcgatctcaagagctcccgcagttacgccatcctgagcaacgacagcgatgtcaacgcgggggagatccaacagcgcctacgcatcctgaacagcaaggtgatctcggccagcttgggcaaggggcgtcacatacaactctcccagcccataaccctgacactgaaacatctgaagaccgagaatgtaacgaatcccacctgcgtgttctggaactatattgaccatgcgtggtctgccaacggatgcagtctggagtccactaaccgcacgcacagcgtctgcagttgcaaccacctgacaaactttgccatactaatggacgttgtggatgagcaccagcattcgttgttcaccatgttcgatggaaacatgcgcatattcatctacataagcatcggcatctgcgtggtcttcatagttatcgccctgctaacgctgaagctgttcaatggggtctttgtgaaggtaagaaacggctccaatcccttgccgcatcagcggtcgggcagcagacgccagcaaaacaatattcgcgaccagacccacgagtccttgaccctgaccacgccaaccagtcagtccaatgtgccgccgcccagtcatgggaacacgaactttatccaacacaattccatccgcaactcacaccgcaacaatctgaactacaatgtccaacagcagcagcagcaacagcaacaacaagttgttgcggcagctgctgctgctgttgtgctgtccaatcagccgcagcgaaatatgcaacatgccatgaacaacttgaatctgaatctgcatcagcacggtcagcagacggctgctgctgcagctgctgctgcctcaatagccgctgcactgcagcaacatgcagttcaggccagcaacgccagcaataacctcaacatcagccacaactatctgcagcagcagcatgtccagcagcagcagcagcagcagcgtggccagcagccgcagccacatccgcaccgcaatcacaaccttaatgtggacggcaatggattggataacacgaacaacatcattatgcaggccaacatggacgacttacaatataagtggtggtggtgcatttacctttgcctcctggccatcgagctgctctttctcctgggcattgaacagaccgaaacaagcattttctgcggcttcattactattttcctacactgtgccatcctatcgggcaccgcctggttctgttacgaagccttccattcgtactcaacgctcacctcggacgagctcctgctggaggtggaccagacgcccaaggtgaactgctactacctcttgtcctacggactgtcgctgagcgtggtggccatctcgctggtcatcgatcccagcacctatacccaaaacgattattgcgtgctgatggaggcgaatgccttgttttatgccacctttgtaataccagtgcttgtcttctttgtggctgccattggttacacattcctctcctggattataatgtgccgcaaaagtcgcacgggtctaaagaccaaggaacatactcgcctcgctagcgtgcggttcgacatacgctgctcctttgtgttcctcttgctgctcagcgctgtttggtgctcggcctacttctatttgcgaggagccaaaatggacgatgacacggctgatgtgtatggatactgcttcatctgcttcaacacattgctggggctctatatcttcgtgttccattgcattcaaaacgaaaagatccggcgggagtatcggaagtatgtgagacagcacgcttggctgcccaagtgcttgcgctgctcgaaaacatcaatttcctcgggcattgttaccggcaatggacccacagccggaaccctttgcagcgtctccacgtccaagaagcccaagctgccgttaggagtgagcgaagaggcgcatgacgatccccagcagcaacagcagacaccagtgcccatcacagaggatgccattatgggagccacctctgattgtgaactgaacgaggcccagcaaagaagaaccctaaaaagtggcctaatgacgggcacactacaggctccaccgcagacccttggtggccatgttgtgctcgaaagaggtagcactctccgctccactggtcatgcctcacccaccagctctgccgggtccacacacctgatttttgcgcacaagcaacaacaacaacagcagcaacagggacctttgggcgagtcttactaccatcagccggactactacagctggaagcaaccatcaactggaacaggaggattgaaaacaccgcgggagtactacaataatgcgggtgctgctgcatcatcgccgcaacaggcgcacgaggtattctactggactcaaaagccgaacagcggccacaatggcaaaaagaagaggggcgccggaggagttcccgcctcgcctagtggatctctgcacagtcgcacggccgccgcctcccaggtgcttttctatccatcgtacaagaagaccaagcctggccagccaacaggctatccgcaatacgcggaggcgttggacccaccactagccactggcaatgcggctgcctactaccagcagcagcaacagttgcgtcgccagcagctacatcagcagcagcaacagcagcagcagcagcaactctcctcggacgaggagcaggccgagcaacatgctcacctgttgcacctgcaacgacgagctggtagccagcagcagctccctgctccaccgccacacatggcgcagtaccagcaggagtttatgcagcgccagtatagaaataagcattccaactgtgatctgggcatgggcgatgcctactacaaccaaggcagcgtcggcggcgcggatggtgggccggtctacgaggagatcctcagcaaccgcaactcggatgtgcagcattacgaggtgggtgacttcgatgtggacgaggtgtacaacaatagcgttggcactggcgtcttcaacaacatgagagcggcggtggccgccggcggtagtcggtacggcggcggaagcctgagtggcggcagtgtctcgtccaggagccaacagcagcagctcaagaagcagcagcaacaacagtcgctggctcagcaaagatcggctcgacgctgcacggcggatgacgatgacgacgaagacgaggaggaggatgaggaggcaacggccgcggagcaattgcacgacagcgtctgtgatgaggatgaggaggaggacgagagcgacttggaggatgatgctcatggattgccaccgcagagcgatgagcggatgcgtcgtctgatggcgatgcaggacgaggattttaagcggcggtttcaacgtcagctgcgcaaacatggagcgcctcttgactacggggctttgccaccaggagcaggaccgcaacccgagcacaacggtgcggtttttggggttagcggcggcgttggtgagggctccctgcgtggcgcattccggcagcagcagcagcaagcactgaatgccaagtcgccaggcggccgtttggcggtaaatgagctattcggtcacggcaactcgggaccaccgctgccgccggcgaatcagacgcccgcgcagaagcgccagcagctacagaaactgtcaccacagtccaccacatcatcgtcgtcgcatacatcacacagcaatcccaatccgcatccccaccagctaacccatccgcatccccatcagcatcctccgcaccatcagcagcgccacctgtcggccatgctcgatgagaacaacacggtgcgatgttatctggaaccactggctaagtga

SEQ ID NO: 9 - protein, 1905 aa, Drosophila
MLPTILSISYEHISLDLSKYQTAYACEGKKLTIECDPGDVINLIRANYGRFSITICNDHGNVEWSVNCMFPKSLSVLNSRCAHKQSCGVLAATSMFGDPCPGTHKYLEAHYQCISAAQTSTTTNRPSPPPWVLSNGPPIFGNGSGLIHPPGVGAGAPPPPRLPTLPGVVGISGNPGLFNVPPQHTAVTHSTPSSSTTAVGGGRLKGGATSTTTTKHPAGRHDGLPPPPQLHHHHNHHGEDTASPTKPSSKLPAGGNATSPSNTRILTGVGGSGTDDGTLLTTKSSPNRPPGTAASGSVVPGNGSVVRTINNINLNAAGMSGGDDESKLFCGPTHARNLYWNMTRVGDVNVQPCPGGAAGIAKWRCVLMKRIPDSGYDEYDDDISSTTPAPSGGDCLHNSSSCEPPVSMAHKVNQRLRNFEPTWHPATPDLTQCRSLWLNNLEMRVNQRDSSLISIANDMSEVTSSKTLYGGDMLVTTKIIQTVSEKMMHDKETFPDQRQREAMIMELLHCVVKTGSNLLDESQLSSWLDLNPEDQMRVATSLLTGLEYNAFLLADTIIRERSVVQKVKNILLSVRVLETKTIQSSVVFPDSDQWPLSSDRIELPRAALIDNSEGGLVRIVFAAFDRLESILKPSYDHFDLKSSRSYAILSNDSDVNAGEIQQRLRILNSKVISASLGKGRHIQLSQPITLTLKHLKTENVTNPTCVFWNYIDHAWSANGCSLESTNRTHSVCSCNHLTNFAILMDVVDEHQHSLFTMFDGNMRIFIYISIGICVVFIVIALLTLKLFNGVFVKVRNGSNPLPHQRSGSRRQQNNIRDQTHESLTLTTPTSQSNVPPPSHGNTNFIQHNSIRNSHRNNLNYNVQQQQQQQQQQVVAAAAAAVVLSNQPQRNMQHAMNNLNLNLHQHGQQTAAAAAAAASIAAALQQHAVQASNASNNLNISHNYLQQQHVQQQQQQQRGQQPQPHPHRNHNLNVDGNGLDNTNNIIMQANMDDLQYKWWWCIYLCLLAIELLFLLGIEQTETSIFCGFITIFLHCAILSGTAWFCYEAFHSYSTLTSDELLLEVDQTPKVNCYYLLSYGLSLSVVAISLVIDPSTYTQNDYCVLMEANALFYATFVIPVLVFFVAAIGYTFLSWIIMCRKSRTGLKTKEHTRLASVRFDIRCSFVFLLLLSAVWCSAYFYLRGAKMDDDTADVYGYCFICFNTLLGLYIFVFHCIQNEKIRREYRKYVRQHAWLPKCLRCSKTSISSGIVTGNGPTAGTLCSVSTSKKPKLPLGVSEEAHDDPQQQQQTPVPITEDAIMGATSDCELNEAQQRRTLKSGLMTGTLQAPPQTLGGHVVLERGSTLRSTGHASPTSSAGSTHLIFAHKQQQQQQQQGPLGESYYHQPDYYSWKQPSTGTGGLKTPREYYNNAGAAASSPQQAHEVFYWTQKPNSGHNGKKKRGAGGVPASPSGSLHSRTAAASQVLFYPSYKKTKPGQPTGYPQYAEALDPPLATGNAAAYYQQQQQLRRQQLHQQQQQQQQQQLSSDEEQAEQHAHLLHLQRRAGSQQQLPAPPPHMAQYQQEFMQRQYRNKHSNCDLGMGDAYYNQGSVGGADGGPVYEEILSNRNSDVQHYEVGDFDVDEVYNNSVGTGVFNNMRAAVAAGGSRYGGGSLSGGSVSSRSQQQQLKKQQQQQSLAQQRSARRCTADDDDDEDEEEDEEATAAEQLHDSVCDEDEEEDESDLEDDAHGLPPQSDERMRRLMAMQDEDFKRRFQRQLRKHGAPLDYGALPPGAGPQPEHNGAVFGVSGGVGEGSLRGAFRQQQQQALNAKSPGGRLAVNELFGHGNSGPPLPPANQTPAQKRQQLQKLSPQSTTSSSSHTSHSNPNPHPHQLTHPHPHQHPPHHQQRHLSAMLDENNTVRCYLEPLAK

SEQ ID NO: 10 - DNA, 4914 bp, Drosophila
cgcgggctccatacgattcgtattagcccgcaattgtataaaggttagttagtttcttagctagttagttggacatttagaagtaggactttttctgtgcgaaaatcagcagaagttgaaggaaaaccctcagtaattccgccaaagttcgttgctggaaaaggactcttttaaggtaatttcatgatattgactcgtttcagttaagtccctaaagctaatggcacactgaatacaattaggcattacggctacgattgcaattgcgtttttttttttcgattgttaagtacacttgtttcggcatcgggagaagacagcaaagttggaaacctagtttctggttcccatttttatttttttgtttttgaagacatgaacatgcgtatcacagtatttggttgctgcgcgtttctctctctctctaactcaaaaaaaaagaatttatataaaaatgctaaatatatatatgtatatatgtgttatgtacgcaaaggcgacacacattaagtcctaatgtctaaaaggcaagagcgattattgaatttggttacaccaaaatggtaaaaaggcaacgcaaggggcaactaattaggagcaacattaagtacacacaggaaaataggatatgaagcccatctagggcaattacaaatacattgtagatgacctatgacctcgcgataaaggcccaaactaaagcactaagagcacatttccggggttatatacacagtacatagatcggtttaccccattgtgttctatggacaggcaaagcaactaaaatcgaaataacgatatcgttatctcacgatcgttttatgacaaacaaattggaccgtttccccacccatttaagttgctttgcctctttcgatacccgaaaccgcattaagttatagtagaggattgactttggcacagcagctgctgcaggaacattgactggaagcaggaagcatttcctgccctgaaatggtacctaatccaattccgtctagagtagcgtctcattgccatactgctgcaagtggggatagtagctgccgtgctggctgtacttttgcgaggcatagctacctggcggataatacagccgatgcgaggatgtggagtgatgctggtgattgtggtggggatggaactgatgatgctgctgctgctggtgatgatgatgatgcggcgaatggcgctgctggtgatgcacgctcctgcccagcgaatagttggacatctgattcagcgatatagagccggtaccaggcgaagtcttcagtttgtacggacttggcggcaacggaacactggccatagaagttcgcaccgaatggtaggagaccaccgtgctattgcaagccgcatgcgatccacgcgagctactatgcccgtccaggtgtccagttgctgctccggcagacgtatgcttcaccattttgccattgctgacttgcctcttgtagagagtggaaatgcttggtccaagtacccaggcaaaacagcaaatgcccagcatcagttccatgaaggcgcgcaacaaaaatggccaaagtggcgtattggtatcacccgatcccagccagacatcgatgttggcaaactcgtaaatgacagccaacagaagcatggcacatgcaagtccatagatgaaaaggaatatgccaatgccggaactactgtgtgcgcttagctgttgcagttgctgttgcacgctgagtgcattgctattcctcaggatctccttggtgcgacagtgtaccaaatagccggagatcagattcatcgagccaaagatccagtagcaaaaaacgggcgtagccaccaatatctgtagcgccttatccgactgattgcctacgaaacaggcgcctagaagagcgtatggttgggttactctccgaattctccggcggatctatagcatatctcaccaagcaactcgtcagcatccacgaaacgggcaacgatcactgctgacgtttgaaaggccggcaatccccaggccacgaagcacacaaagttgttttgcgttagatcctgctgagccgtcttggcactgttcctcttcgccggactgcctccaaagttcgagggaatgaccacatggcccttggagtccggactgtgccgacgaatgtcgcggtgccagcccaaacagagcacagcccacctacaaataggatatgggaatatagtttctataatattaagtatatattataatctaataccaagcgcaggcggccattccaaaatagtagcgcataaggaagacactagcgcaggaggcattggacagtccgtccacggtgagtagggattcattgggcgcctggggatccgtgccgcacgcagttcccgttcttcccaccataaagcgcactgcccagcccaaggtgaccatgttgtggcaccaaatcagcggcgacaacaatctggaccacttggcgctggccaaacgactgccatcgctggccaaaagacacacggtggctaccagggccaaacccaaagcggcataggcccatgtggagacccagatctctgccagatgcttctccgccggtgtgaacagtatgtccgcctcgcagagtggtgcacagcgtccagatctgggtagccttacgtacagatgcgatttggccagtcccgagcaatccatgggcagtttaccgcccaatccaccgggtattccttggcccggtagcccatacaaatcctgctcctgctgcggctgatgcaattcaccgggaccttccatacacatcgtctcgtggttgttctctcgcggaaatttatcgcagtcgagagccggtggccatggaaatccgaatccctgcaaaactggatgacaacgtattcgcacggactcacagagactccggcacggaccgatggcatggactggagctttgggcgtgcacatgggcacgtaggcggcgcacaggaacagcttcaactgggaactgcagtcgtattcgatcagtggtgcaaaggtttgcagtgtgtactccacgtccgtttgcatttcgttacccaccagatttggcatggaggtctcattgtagccgatcttgcggcacatctcaatgcgaatggtttcgcattgccggaaggcggggatttctggcggagaactggaactggaactggcactggggttgccgctcgttgaggattttgagatgcgcggatgcaggaggatcaccaccaggagacacaatatgcaggttggcttcattgcggctgatttgttgttctttcgttccgaagaatacgaattcgatacgtttcttcgcttggtgttccgatttccgtttctctaaaggaatcgaaatgtggaaaagatcagatttcggggttttcttcgcgctgggttccctcttttctttccaaagaatccgaactatatgcagattcttcgttcttcggtggaacgaacgctggaaggggtaacctgttccaggtgcgttcgccctctctcgctcgcaccctctcactcgttccaacaacttccagctctccttctttccagcttgttattgttgcttttggcttgtcaactcgttaactacctcttttttttcggcgtcgttcttgttatcgcttctcctccttcccccactcgttcttcagccccaaccactcccctttctccaccgcacgccgcccaacccgctgatcgacgtcgataaacgggtttttcctcagggattaacccgaaaacgatctagcaaaccatcgaatctttcacacatctcagtgaacgaatagtgtatttgtttcgatgtgcttaaacgaatggcgcagtcagtttgtagccttagcgaatgtattctaatctaattggtattaacatcgaacgtttatatattttattttgttttcgtggtaaaattcaacgcatactggtcactctgagctagagatggctctgcgtcacgtcacctcgcatcgattgcaattgctcaacggatctgctatcgatatcaacaagtgtgttggttactaaatgcttttagatcaaaaggcgccccctggcggagttatgcgtaatcaaagaacattgagaagggcgcgcttttcaaaaacaaatttgtccaaataataagaaacatttaagcataataagaacataaatgttcaataaattctataggtgcagtaaaatacgtgttttgctagcacagctattttaagctgagaacttacaatattttagtacattgtgcttaaggtttaaagatacatatattgaaaaagttctggaaatgcttttgaagaacaaagctttaagaggcgcgctttccgagtatgtgagcttttttcaaatggcacactttctgcggaatataaaataaaaaaacctaataatatgccgcaagaccacttaagataaaatattaaaaatattaaaattgattatattttgtgcaccaaaagtggcggtagcttaatatcgcaaaaccaaattaatagcaattctgagccaaaccgcgattgccatttctgcatgttggtcctccgtccgtttcgccatctccctttggccaccgcttggcctctctttcgcacacacatggcaaacacaagccacgcccatgtatttcaacccccttgacaaaaatacgtaacatgccacttttatgtatgaaacgtgacaaatacgcacatgtgtgagaaagagatccaccgagctggcgagaaagagagagagagacgctggacgtttatgtgtttggcaggactcgcgtatgcagtgtgtgtgtgcgtgtgtgtgtgagtgtgtgtgagtgtttgttgttggttaacgcacacgcgcagacgtagcaacacatacacatatgtggaaaggatatgtacatacatacatacatacatacatatgcccgctgactttttcgccactgccaa

SEQ ID NO: 11 - DNA, 2523 bp, Drosophila
gaccagtatgcgttgaattttaccacgaaaacaaaataaaatatataaacgttcgatgttaataccaattagattagaatacattcgctaaggctacaaactgactgcgccattcgtttaagcacatcgaaacaaatacactattcgttcactgagatgtgtgaaagattcgatggtttgctagatcgttttcgggttaatccctgaggaaaaacccgtttatcgacgtcgatcagcgggttgggcggcgtgcggtggagaaaggggagtggttggggctgaagaacgagtgggggaaggaggagaagcgataacaagaacgacgccgaaaaaaaagagagaaacggaaatcggaacaccaagcgaagaaacgtatcgaattcgtattcttcggaacgaaagaacaacaaatcagccgcaatgaagccaacctgcatattgtgtctcctggtggtgatcctcctgcatccgcgcatctcaaaatcctcaacgagcggcaaccccagtgccagttccagttccagttctccgccagaaatccccgccttccggcaatgcgaaaccattcgcattgagatgtgccgcaagatcggctacaatgagacctccatgccaaatctggtgggtaacgaaatgcaaacggacgtggagtacacactgcaaacctttgcaccactgatcgaatacgactgcagttcccagttgaagctgttcctgtgcgccgcctacgtgcccatgtgcacgcccaaagctccagtccatgccatcggtccgtgccggagtctctgtgagtccgtgcgaatacgttgtcatccagttttgcagggattcggatttccatggccaccggctctcgactgcgataaatttccgcgagagaacaaccacgagacgatgtgtatggaaggtcccggtgaattgcatcagccgcagcaggagcaggatttgtatgggctaccgggccaaggaatacccggtggattgggcggtaaactgcccatggattgctcgggactggccaaatcgcatctgtacgtaaggctacccagatctggacgctgtgcaccactctgcgaggcggacatactgttcacaccggcggagaagcatctggcagagatctgggtctccacatgggcctatgccgctttgggtttggccctggtagccaccgtgtgtcttttggccagcgatggcagtcgtttggccagcgccaagtggtccagattgttgtcgccgctgatttggtgccacaacatggtcaccttgggctgggcagtgcgctttatggtgggaagaacgggaactgcgtgcggcacggatccccaggcgcccaatgaatccctactcaccgtggacggactgtccaatgcctcctgcgctagtgtcttccttatgcgctactattttggaatggccgcctgcgcttggtgggctgtgctctgtttgggctggcaccgcgacattcgtcggcacagtccggactccaagggccatgtggtcattccctcgaactttggaggcagtccggcgaagaggaacagtgccaagacggctcagcaggatctaacgcaaaacaactttgtgtgcttcgtggcctggggattgccggcctttcaaacgtcagcagtgatcgttgcccgtttcgtggatgctgacgagttgcttggcaatcagtcggataaggcgctacagatattggtggctacgcccgttttttgctactggatctttggctcgatgaatctgatctccggctatttggtacactgtcgcaccaaggagatcctgaggaatagcaatgcactcagcgtgcaacagcaactgcaacagctaagcgcacacagtagttccggcattggcatattccttttcatctatggacttgcatgtgccatgcttctgttggctgtcatttacgagtttgccaacatcgatgtctggctgggatcgggtgataccaatacgccactttggccatttttgttgcgcgccttcatggaactgatgctgggcatttgctgttttgcctgggtacttggaccaagcatttccactctctacaagaggcaagtcagcaatggcaaaatggtgaagcatacgtctgccggagcagcaactggacacctggacgggcatagtagctcgcgtggatcgcatgcggcttgcaatagcacggtggtctcctaccattcggtgcgaacttctatggccagtgttccgttgccgccaagtccgtacaaactgaagacttcgcctggtaccggctctatatcgctgaatcagatgtccaactattcgctgggcaggagcgtgcatcaccagcagcgccattcgccgcatcatcatcatcaccagcagcagcagcatcatcagttccatccccaccacaatcaccagcatcactccacatcctcgcatcggctgtattatccgccaggtagctatgcctcgcaaaagtacagccagcacggcagctactatccccacttgcagcagtatggcaatgagacgctactctag

SEQ ID NO: 12 - protein, 700 aa, Drosophila
MKPTCILCLLVVILLHPRISKSSTSGNPSASSSSSSPPEIPAFRQCETIRIEMCRKIGYNETSMPNLVGNEMQTDVEYTLQTFAPLIEYDCSSQLKLFLCAAYVPMCTPKAPVHAIGPCRSLCESVRIRCHPVLQGFGFPWPPALDCDKFPRENNHETMCMEGPGELHQPQQEQDLYGLPGQGIPGGLGGKLPMDCSGLAKSHLYVRLPRSGRCAPLCEADILFTPAEKHLAEIWVSTWAYAALGLALVATVCLLASDGSRLASAKWSRLLSPLIWCHNMVTLGWAVRFMVGRTGTACGTDPQAPNESLLTVDGLSNASCASVFLMRYYFGMAACAWWAVLCLGWHRDIRRHSPDSKGHVVIPSNFGGSPAKRNSAKTAQQDLTQNNFVCFVAWGLPAFQTSAVIVARFVDADELLGNQSDKALQILVATPVFCYWIFGSMNLISGYLVHCRTKEILRNSNALSVQQQLQQLSAHSSSGIGIFLFIYGLACAMLLLAVIYEFANIDVWLGSGDTNTPLWPFLLRAFMELMLGICCFAWVLGPSISTLYKRQVSNGKMVKHTSAGAATGHLDGHSSSRGSHAACNSTVVSYHSVRTSMASVPLPPSPYKLKTSPGTGSISLNQMSNYSLGRSVHHQQRHSPHHHHHQQQQHHQFHPHHNHQHHSTSSHRLYYPPGSYASQKYSQHGSYYPHLQQYGNETLL

SEQ ID NO: 13 - DNA, 9795 bp, Drosophila
tcatactcactggctgccaacccctactctactctgactactttggttctggttttggatcttggctgatgctaggttctaactttaagtacgattcttagtattgctcactggatacactgtagatacaccgcagatacagccgtcctgcggcggcacaacaacaagaaaacaaacgctaatgcagctacttacgactaggaggatgattagtggcaaggggttaaggagcgggttaatcacaactggctgggaaactgaaagtggccgacaagcgcatctacttaacctagatgatggtcctacgcggcccagggtcaatcacattgcggagtaggttctacacagagagatgcgatttggtcaaaaactaagcttaaacgaccgcgatgttatcttatcaattaaaacgaaaaaaatggaatcaacatttttatagacccatttaaagagctatcatcttttttcaccgaaatacttaaggaaataatatgcatgcttagtaaaggaacactacactaggtcttaagaaatgattatcaagaagtaaacatttggcaccccgaggcgaatactgatactggtagtttttagaaaactttgctgataccgaaaactcgcgaattaagataaattctaacattgcacaaatttcttagtttacattgtaaattttgtctacttctaggcagagcacaatgtgcctgcaattttctccgtgttgttgattctgctaagttcaggaaaatgactagctatgtgaacttgacttgaggagggagggggaggttcgtatcgtgacttatctagcgttttaccctaatgcatttgattgctttaagctgatgattggtcagttgcacacgcgctattctggggcagattttgtgggcgtgtcgtaaaataattgcttggtgtttcgcttctaattgacgaggacttggacttggatttgaagtgtggaccgtgtacagagtggacaatggacagggcatcttatttattcggtgccattcgcaggcgcctgctgctcctcttcctgggaatcgccgagggaaagcctcgacttgcccgctgtttccatcgatttccaggtgcctccactggtggcctgctgcagcgaaatgcgaggtatggacttgcagctgcccaagatagaggtgctatctccgggacggtcctcggattcggccagggcgctgagactgcaagtgggcggcaggatgcggtgtggaaagcgtggcgaaccccttaccctttcccttaaactgggtggctgctgcaccaccgaaggtctccggttgctgggcaattggaagttcaccttggtctccagcagtttcacatactttccacccaacgtttggtccccctgttcaccgccagaaatagtggggataggcaggaaattcggatccttggtaaggtgatccaggtgagtaccgcttttggtcaatgaacccctatggatgggctttaggtggttaccattcgggtgggaggacgcctctgagggaatggaatcctgatttggattattgtatatggcattgcaggacgccgtttgagaggagggaatcaggcgggtgaacagtcccatgtgcgatttaaaggccgccttcagacccttttggtccgccaagctggcggtggatcccttgttgctcgaagtggtgcgagaaaatatccctcgtaatcggtttatcaagcccgtcttagcctccgtggcctgctggtgggctaaacggaggttaatcaagtcctgtgcaggcaggcaggcctcctctaattggggctgggaggcaaaggtaacagaacgcctcatcgggatctgcatgtactctgctgacggccaactggcccgtggaatcacaggaggcagcacggaaagcaggagattgggcagtattcccgagatacttggagttctgtttttacttgcagccggagtctgcgagatgccactggttaccgtcagttctggctttagatgacctcccccagttaagagtgatgtggacgacgaagttgtggtggaggtggtggttagtcccgactcgagtagcctctccagctttcgaatctcggcgtccagagcctggatttccttcttatagaccctgttttgcacctccactcgatactgcagttctcggcgatcatcgaccacgaatcggcgtgtgttgcactccatcttaaggcccatactgtggataaccggatcgataatatcgtctgagggagaaggagagttcccaaaggattaggacacaactttataaaggttctagaaattaggagactagaacttaaaagtatttcctaagtgagcaagatcttattgcaccttcaagcgctacttacttcttgcccaaatatcatggagttttgggatgaaaagcagacaaagggttgcagtggtgctggttaaaatcagagctgtgattgtgatgaaggccagggtgactcgctccgaaatcaagttggccagcaccacgacgatggcgctggtgatgaccacactgtatacagacactccgatgtactgcgagtcattgagagcaggtatttttacgtggcgcgtctcccaggccatatagacacccaccacaagaagaaggcctttgtaggcgtacaggacactcaaccacgtttgcgtgtgctgcgaacggcaaacttcaacctaaaatagatagatagatagatattcatagattctaaatgaattaatactttttcaacataattaaaagtaatctgataatttgaagcatattaatatttttcttacctgaggctggtaaacgacacttctatcagtcgcactgatctcgagcgtcaggttgtgaagatggcgctccattggatcggtgaccacccaaagggttacgagcagcgcatccaccagaagcaatccgccgacgagcaagatcagttgaatgtcctgcagcatcttgtccttgaaaacgctgccggtacgagtgaatatccgatgcactctgtaggtcttggcaaacatcgatccaaaggccaacgagaatccggcggagagcagatagacgcgggcctggtgagcatgataagcggatgacggggaagttcaggttagggagaaagtactgtagtagcagcagcaaagtaacacactaagtgtcatgtcaggcagacccaaagaaaacaagccggcggcaacaatgggggaaacaagtcatcaatggaccacaattctcagagtgcttgagactttgttgtgcgtttcaaatttatgcaaataaaggaatatcacaaaagttgtaaatttccgtgtcatgtgtttgcatttccctgccacaagcctcaacaaaacaaaaacaagcaggcaactggaaaagcggaacgacagtagaagtggttacagaaacagaaacaacagcgaccagcaaatttcccaggagtggcgttcgaggcagttgttaagggggtcaaagtggaaaggcgcagatcgggatagaagaaagctcgtcaaacttgacttgacttctggcttaaagagcagcagatttgcagcgaaaccgaacggctatttatagccagcaggggcagtcgtgtatcttgaaaagacacgcggaataatcaatattcagtttatataatccactttaaaataatagaaattaacaaaaaattgccacaattatcagtaatttttatacttcgcaggctattttatcgccatcttcgtgtatacgaatacgacaattagttcaagcaatatttctttcagtgaataaataaagcaaacacatgagcgcgactcgaaagttaccagcctgaaactgaaagtcatatttgatgaggaccccacatgcttgcttacacacagaagcccgtcaaagtcaaacaaagacggctgagaggaaaggcggatgagaatgcggattcggataggaatggcgatagggatggggatgtcggagccgaaggataacaactcaccgtgcagaccgttgcgaaagagtcctccgccgagggcagcgtcgagtggtccaagcccaaaaggatgacggtggcgtacacaaagatgcagcccactgcggtgatgttgctcagcttcgggctggaaagtttaattgccctgtggagtgagaagggggatggtcatggttataagctgaggcgccgcaatcctttgcagagaaagtgcagagtaaccgtagaatgcgaaacatatatacgaactcaactaacgatgggtcagaaatacagctggaaagccaagcaattacttcacttcaaaaaccgaaacaagtcacatgtgtaatgggttcaatgggttgagcaccgaaagcagttaactcatcatggaatataaagaaacagcccgcacaaattctcttttatatggccactaaatattttatagtcgtttaatgaaaaataatatattcaaacaatcagggcccataaaaagagtaagccaataatttatgtacttatcgccttacttcagcttccgaaagtgcagattgaacgccaggaaggcgatggccagagcgattcccacgctggagagggtggcgatggtgtagaaggccagtggagcgatggtcgccacccgcagcttgaacacccgcttggcgatgggtacctgcccgctgtgccacttcaccggccggcagcggggacaccggaagtccagggcatccgtggccggatagtagagggccaccggttccagcaaaccgcgctggatttgatagaaggcagtggtgccaacgcgatctgggccgctgaaggaaacggggccctaccaaaaagagaaatactcgtgatgaactagatttaagaaccttaggatcaaagttaaatgggttggatgatttcagttgaaagagataactcaccgacactcccaggaagtggagcttgcccatttgctgcaggaactcccaggccatgtcgctgcgggtgtaatcgaatccgtccagcttcgactgctcctcgttccgccgccagtgctcctcagcggctctcaaggccagggcgatggcccacacggcgtcgtaggtttgcggcgcgtactgcgagatcgcctccggaaagaggtgccctccgctggtgcctcccacgccccttctcctccgccgacgagagtcagattgcgttgcagcgatactgatcctggaaccataaccggagccaaatccatcctggccgtggaactgggcggattgcttgcgcagctgggagttgaacatgtgattgttctgcgaagtggaaacgcgattaaacaagcctcgaatgccgcagaaatgtcgccagtaatgagattgcctatggcagctaccactcctgccccaatttcatgaccagcactaaaagagccataaaaacgcgtctgcgatggtgaatgcgaatgcgatgacaggccggacttagggggcttcgcacttggcaatcaccatcgccatcgccattgctgaaaccatcgcgaaacgcaatcgcagcctcgggattgtctaatcaaataaatcatttcatttcggacacgcacagcaagacggacaagacaggacaacgagaaggacaagatagtcgtctctgaataaaaaaaaaaaaaaaaaaaaacggggaataaaagtttcggcaattctggaaaatgttgcttgaagctgcctttgagagttgggttcaatccaatttggatcccgaaatttatatgcatgtataacttaacaacaatctattcttgaaattcatctttacgttaatctcatactgtcatgaaattaatttatttattttccctttaatattgaatgatattttctcgcagtgcacctcctcaacttaccagtccactatagctgacgttatttccaacgatgctgttgtgcgttgagaccacgatgaggttctcgacggccagctgcagttcgtggttagagcaggcggtgcgctggtccggccaccacggagcccccatgctctcgtggaggatccaggcgtagtccgccccgaacattcgaagcctgtaggcctcgcacaggatctggggggccagctcctgcgagaagctgccgatgatgatgcgcgtgtccgtctcctgtggcgatacgaacgaaacggaacggcatgtgcccatttgtcatttgtcatccttcgattagcacaagtgccaatccacactcaaaaaaaatgggtaacaatcatcatgctgatagagggtctctaggcgatgtggtctgctaatgaaacatttatccatgcggactggacgaacaaaaaacttgaagataaactcagagaaataagttaacgtaaaaaacgtaattataatcatacatatgaaccttttttttaaaaacttactaaattaagttgccaggcaaataaattggtctatttaaatattccccaaatacgttcattttcatatttgttcatgcataagcttttaatataaacagaacagcgctagcaccattttaatttaaacattttcgaaaattgaaatttagttaaatttaatgttggtttttcaaacaaatattcataaatgtttacgtttatacgtttgcgtatacgagtataaaataaaacgaaaatgtgtatttaaatggccatttgttgctcaccctaagtagcagcagctgctccttgaagtcggtggccgcaaaggtgatggtggcggcacaggatatgttggccgcctccagttcggtgaccaggttgttcaccgccagcgagtgaacctcctcgttctgcgagaaagtggtcaccgtgccccagccaaacttccgaatgaaagcgatgcgcgccggattgtgtgaggagtccggggccaccgtcctgtagaagtaggggaactcccgcctgtcgctcaacgccggcgatgtggaaccgaaggatacctttcatcgaacgaaatcgttagactatctctaccgtacatggggtcgcttaaaatgcaagacacgcatcaagaaatccagccctctaggtcatgtgtcttcccagtttccccactcatttaacacacgcaccgccgaaatgaaacttcaaaggccaaatgcaaatgctctaagtgaatttgtggacctcataatttgtgggctgtggaaatgtttatggctcaaaggtttatggggtgctggaatcggctggattccgcagcatttatgctaatcgagctacgcacgtgagttgattagatttttgagaaattgcccgatacgaggagttggttggatgaaccgagcgagctggattatttgcattttaatcagtcgcagatgactcacctgcacgatgttccagtagggcaccaccttcgccaggctctcggtgacctccgagcaggccgatcccagcagcatcaccatcctcgtcgagggctgtgtgtagatggcgtggaagaagcgatccacgcccactccaggatcacactgattgtcggagaagaaatgtgtgaagaaacggaggagcaaaggacaccacatcagagatgagtaatagagggggcagggaaaatagcagtggcagaggccgttgctcgctgactcgtttcgacgcaataaaaaggcaacatgatggcgcaataaacatttttaaaatgtcgacttttagagaggcacagccggagatgcggctccagatatgacagtctgtttaaggtcgatgtgcatatgcatacacttaaaaaaatcgtttgaaaacctagttcactaagtgctgacatcacagtcgaggtattacgtattgacggtttaatttatcagaaactaaactactattatgcattttcttttttttaccatcaattaattgtagctttaatacactactgcaccaagttaaaaatgattgcaggtaaatagtttacattgttggtaacttagtcagtggcattgcttttcttcagtgacagtgttctgtacatttgcgtgccccatcaaaaccggcaacgactcatcgcaataaaagcgcgaaagacggaaggttgatgacatatttgcctctcttttagggccacagccgcagctgctatccgcactgttcttgttgttgcagattttcttattaagttttaatgttgcacgcgctactgaatgaaaattcaatttcgtaatggaacagcgacgcctagaagtggcgcccaacgtggggcatacggttacgccacgtagaaatgacattctcacctgagtatcgttggtcacgagctcgagggtgtagcccggcagcaggcgcttgcggttgatgtgctccacggccatggtggcagctcccaattcgctcagaccatccggacgtggtccccgcgatgtggacagctcaaagagtccgagcagcacgattttgccatgattgcgctgcatttcggccggcgacatgcggcgttcgctttcgaacacctggttgaccttcaagtatcgctgcctggggggcagattgaggaggtggtgggcgtgggaggcattggtgcttccgggcagattgctgtgcgaattgaggcgctgctgccggcgtttgactttcgtccgtttgtacttccaatcggagcgcggtggaatcggagtcccccctgcagtcacagtcgatgccgattctccgggtggcgagctggatgggctggatgtgctaattgaggcagcacctggcctaattgcctcgtagcccagggcctgcagctcggctgatgactccatggcagccgctgccgacgttgcccaggcaagggccaggactagcctcagtcccacggccggccatggaccgtatctggtcccttggaccggttgaattatgcgcatcccgtcggcaatggccaatggcccattaatcaccaaggcatttgaatcgtcggctatcagaggctgcagcaacaaacaaacacgagccacacagcacaggacaccggaatatatatcgcctttttatgcactctgccgacaggatacgcttatcgtttctcttccgacgagcggctcttccttctgctccctcctcttgtatcggcgtcaattttatcgcctttttattggcctcacttttgctcgcattttgtatctttttgcacattcactctgcacagcagtcgaccataaaagtatgcaatgcaaaggactttctcgataggtccgattgacaggattgggtaacacgggaaaaaactacacgccattcgctaactttcagtcacttttcgtagaaaaaaatgcttatttttattatgcactgtttattaaggattaacacaatttaggtgaatatttattagtattttgctgtagtatgtgattttattaaaatgtaatttgaatctacatatgtatatatatgtatatatgtgaaaacattgattttttcatgagaatgtgaaagggaatgttaatggaaataccgaaacaaatgtctagggaggcataaaaaggcatttcacaccaatttggcagtcgaaaggattatgacgaaggcttcgatgatatggacacaccgcgccgctcacgtctcgtcccatgacttgttatgtgcctgccacttggccattattttttatgctaatggccaaacattttgcgctttcattgcgggcttttggactactttttgtcgagtctcacgcgccacagatttctgtggcgaacgtttttctctgtatgcgcgcgtatgcataattgtttcaagattaccaacttgcagtccctttgccgctttcccgcttttccaccgcccacttgcctgcacctaagcccacttcatagacgctttccttcgcgctttctgcttttcccacagcacgcttttcgctgt

SEQ ID NO: 14 - DNA, 3918 bp, Drosophila
atgcgcataattcaaccggtccaagggaccagatacggtccatggccggccgtgggactgaggctagtcctggcccttgcctgggcaacgtcggcagcggctgccatggagtcatcagccgagctgcaggccctgggctacgaggcaattaggccaggtgctgcctcaattagcacatccagcccatccagctcgccacccggagaatcggcatcgactgtgactgcaggggggactccgattccaccgcgctccgattggaagtacaaacggacgaaagtcaaacgccggcagcagcgcctcaattcgcacagcaatctgcccggaagcaccaatgcctcccacgcccaccacctcctcaatctgccccccaggcagcgatacttgaaggtcaaccaggtgttcgaaagcgaacgccgcatgtcgccggccgaaatgcagcgcaatcatggcaaaatcgtgctgctcggactctttgagctgtccacatcgcggggaccacgtccggatggtctgagcgaattgggagctgccaccatggccgtggagcacatcaaccgcaagcgcctgctgccgggctacaccctcgagctcgtgaccaacgatactcagtgtgatcctggagtgggcgtggatcgcttcttccacgccatctacacacagccctcgacgaggatggtgatgctgctgggatcggcctgctcggaggtcaccgagagcctggcgaaggtggtgccctactggaacatcgtgcaggtatccttcggttccacatcgccggcgttgagcgacaggcgggagttcccctacttctacaggacggtggccccggactcctcacacaatccggcgcgcatcgctttcattcggaagtttggctggggcacggtgaccactttctcgcagaacgaggaggttcactcgctggcggtgaacaacctggtcaccgaactggaggcggccaacatatcctgtgccgccaccatcacctttgcggccaccgacttcaaggagcagctgctgctacttagggagacggacacgcgcatcatcatcggcagcttctcgcaggagctggccccccagatcctgtgcgaggcctacaggcttcgaatgttcggggcggactacgcctggatcctccacgagagcatgggggctccgtggtggccggaccagcgcaccgcctgctctaaccacgaactgcagctggccgtcgagaacctcatcgtggtctcaacgcacaacagcatcgttggaaataacgtcagctatagtggactgaacaatcacatgttcaactcccagctgcgcaagcaatccgcccagttccacggccaggatggatttggctccggttatggttccaggatcagtatcgctgcaacgcaatctgactctcgtcggcggaggagaaggggcgtgggaggcaccagcggagggcacctctttccggaggcgatctcgcagtacgcgccgcaaacctacgacgccgtgtgggccatcgccctggccttgagagccgctgaggagcactggcggcggaacgaggagcagtcgaagctggacggattcgattacacccgcagcgacatggcctgggagttcctgcagcaaatgggcaagctccacttcctgggagtgtcgggccccgtttccttcagcggcccagatcgcgttggcaccactgccttctatcaaatccagcgcggtttgctggaaccggtggccctctactatccggccacggatgccctggacttccggtgtccccgctgccggccggtgaagtggcacagcgggcaggtacccatcgccaagcgggtgttcaagctgcgggtggcgaccatcgctccactggccttctacaccatcgccaccctctccagcgtgggaatcgctctggccatcgccttcctggcgttcaatctgcactttcggaagctgaaggcaattaaactttccagcccgaagctgagcaacatcaccgcagtgggctgcatctttgtgtacgccaccgtcatccttttgggcttggaccactcgacgctgccctcggcggaggactctttcgcaacggtctgcacggcccgcgtctatctgctctccgccggattctcgttggcctttggatcgatgtttgccaagacctacagagtgcatcggatattcactcgtaccggcagcgttttcaaggacaagatgctgcaggacattcaactgatcttgctcgtcggcggattgcttctggtggatgcgctgctcgtaaccctttgggtggtcaccgatccaatggagcgccatcttcacaacctgacgctcgagatcagtgcgactgatagaagtgtcgtttaccagcctcaggttgaagtttgccgttcgcagcacacgcaaacgtggttgagtgtcctgtacgcctacaaaggccttcttcttgtggtgggtgtctatatggcctgggagacgcgccacgtaaaaatacctgctctcaatgactcgcagtacatcggagtgtctgtatacagtgtggtcatcaccagcgccatcgtcgtggtgctggccaacttgatttcggagcgagtcaccctggccttcatcacaatcacagctctgattttaaccagcaccactgcaaccctttgtctgcttttcatcccaaaactccatgatatttgggcaagaaacgatattatcgatccggttatccacagtatgggccttaagatggagtgcaacacacgccgattcgtggtcgatgatcgccgagaactgcagtatcgagtggaggtgcaaaacagggtctataagaaggaaatccaggctctggacgccgagattcgaaagctggagaggctactcgagtcgggactaaccaccacctccaccacaacttcgtcgtccacatcactcttaactgggggaggtcatctaaagccagaactgacggtaaccagtggcatctcgcagactccggctgcaagtaaaaacagaactccaagtatctcgggaatactgcccaatctcctgctttccgtgctgcctcctgtgattccacgggccagttggccgtcagcagagtacatgcagatcccgatgaggcgttctgttacctttgcctcccagccccaattagaggaggcctgcctgcctgcacaggacttgattaacctccgtttagcccaccagcaggccacggaggctaagacgggcttgataaaccgattacgagggatattttctcgcaccacttcgagcaacaagggatccaccgccagcttggcggaccaaaagggtctgaaggcggcctttaaatcgcacatgggactgttcacccgcctgattccctcctctcaaacggcgtcctgcaatgccatatacaataatccaaatcaggattccattccctcagaggcgtcctcccacccgaatggtaaccacctaaagcccatccataggggttcattgaccaaaagcggtactcacctggatcaccttaccaaggatccgaatttcctgcctatccccactatttctggcggtgaacagggggaccaaacgttgggtggaaagtatgtgaaactgctggagaccaaggtgaacttccaattgcccagcaaccggagaccttcggtggtgcagcagccacccagtttaagggaaagggtaaggggttcgccacgctttccacaccgcatcctgccgcccacttgcagtctcagcgccctggccgaatccgaggaccgtcccggagatagcacctctatcttgggcagctgcaagtccatacctcgcatttcgctgcagcaggccaccagtggaggcacctggaaatcgatggaaacagcgggcaagtcgaggctttccctcggcgattcccaggaagaggagcagcaggcgcctgcgaatggcaccgaataa

SEQ ID NO: 15 - protein, 1305 aa, Drosophila
MRIIQPVQGTRYGPWPAVGLRLVLALAWATSAAAAMESSAELQALGYEAIRPGAASISTSSPSSSPPGESASTVTAGGTPIPPRSDWKYKRTKVKRRQQRLNSHSNLPGSTNASHAHHLLNLPPRQRYLKVNQVFESERRMSPAEMQRNHGKIVLLGLFELSTSRGPRPDGLSELGAATMAVEHINRKRLLPGYTLELVTNDTQCDPGVGVDRFFHAIYTQPSTRMVMLLGSACSEVTESLAKVVPYWNIVQVSFGSTSPALSDRREFPYFYRTVAPDSSHNPARIAFIRKFGWGTVTTFSQNEEVHSLAVNNLVTELEAANISCAATITFAATDFKEQLLLLRETDTRIIIGSFSQELAPQILCEAYRLRMFGADYAWILHESMGAPWWPDQRTACSNHELQLAVENLIVVSTHNSIVGNNVSYSGLNNHMFNSQLRKQSAQFHGQDGFGSGYGSRISIAATQSDSRRRRRRGVGGTSGGHLFPEAISQYAPQTYDAVWAIALALRAAEEHWRRNEEQSKLDGFDYTRSDMAWEFLQQMGKLHFLGVSGPVSFSGPDRVGTTAFYQIQRGLLEPVALYYPATDALDFRCPRCRPVKWHSGQVPIAKRVFKLRVATIAPLAFYTIATLSSVGIALAIAFLAFNLHFRKLKAIKLSSPKLSNITAVGCIFVYATVILLGLDHSTLPSAEDSFATVCTARVYLLSAGFSLAFGSMFAKTYRVHRIFTRTGSVFKDKMLQDIQLILLVGGLLLVDALLVTLWVVTDPMERHLHNLTLEISATDRSVVYQPQVEVCRSQHTQTWLSVLYAYKGLLLVVGVYMAWETRHVKIPALNDSQYIGVSVYSVVITSAIVVVLANLISERVTLAFITITALILTSTTATLCLLFIPKLHDIWARNDIIDPVIHSMGLKMECNTRRFVVDDRRELQYRVEVQNRVYKKEIQALDAEIRKLERLLESGLTTTSTTTSSSTSLLTGGGHLKPELTVTSGISQTPAASKNRTPSISGILPNLLLSVLPPVIPRASWPSAEYMQIPMRRSVTFASQPQLEEACLPAQDLINLRLAHQQATEAKTGLINRLRGIFSRTTSSNKGSTASLADQKGLKAAFKSHMGLFTRLIPSSQTASCNAIYNNPNQDSIPSEASSHPNGNHLKPIHRGSLTKSGTHLDHLTKDPNFLPIPTISGGEQGDQTLGGKYVKLLETKVNFQLPSNRRPSVVQQPPSLRERVRGSPRFPHRILPPTCSLSALAESEDRPGDSTSILGSCKSIPRISLQQATSGGTWKSMETAGKSRLSLGDSQEEEQQAPANGTE

SEQ ID NO: 16 - DNA, 7913 bp, Drosophila
ttttctgcccgtttgtttgtgctcccgtccaggtgaaggttaagtgctccgagctgaggatcaaggacaagaaggaactcaccaagcaattggatgagctcaagaatgagttgctcagcctgcgcgtggccaaggtgaccggcggagctccctccaagctctccaagatgtgagtatgccgcggcacaacgacaagcgtcacgaactaattccggtgttttgtgcatttatgtgcgttcttatccatacagccgcgttgtccgcaaggccatcgctcgcgtctacattgtgatgcaccagaagcagaaggagaatctgcgcaaggtcttcaagaacaagaagtacaagcccctggatctgcgcaagaagaagacccgcgctatccgcaaggccctgtctccgcgcgacgccaaccgcaagaccctcaaggagatccgcaagcgctccgtcttcccccagaggaagttcgccgtcaaggcctagaatgcatccagatactccgactgtctatagtgcgcgttaagggttcttcggtacaatgaagaagaaaaactaaataaaatcttttttttaaagtgaaaatagcgatgcgtgtttgattttgtgaccgaaaaaacgcgagtggcacatggctttggccatgggttcatggaaattagttaaaaaacaaaaaaacaagtgccgcattccctgttctacatatgttagtcggatccaatgggatctacttaactacttgtggtccttaagatcattatagagcaaaaacgttgagttagcgccttgtagaagtaatggcaaatcttaagttcaatctttaattcagccttctttgaatatgcaaacttgaaaaacaccagaattctcaattggtctacgtatatgtatttaattcgattgtctttgatgtaagcacggccatacatcgtaaataattatgaactaacaagtaataagtaggtaattgatatgaattacaagctctcgactgcgagctcgatcatactgaatatgtttggcacatttggttaatactattcttctgcacagcgtgaaacagcggcgtgctgcggatgacgcccgacagctccttggagttcttgctttggtgatagtttctactcggcatcggcgacaacggttcgccccagaacttgagcagcgcaaagatcttgtagtaggccactctgaaatagaagatagattcgctattagcagctaaacccgatagcagccaaaactgccagcaaacttacctgtagttgcgattgctggccgcatagatgatcgggttaatgacactggaagcccaggccatcacggaggcgatgatgtgcagccaggggtacgaggtattgcgctcgtcgtccaccacattggccagcattagcggcaggaagcagacgaggaagcacagaaagatggtgaccatcatgacggtcagtcgattgtcttcgcgcgccttgcgcgtgcatgtggtggtcatgtaggatccgccgccggacgacgaggagcccttggccgctgcgatctggaagttatcgtggttgcgaatcttctttttctggtgcagcaccgtaatgtagatgcacgagtacgaaacgatgatcaccaggcaaggcagcaggaagccgatcacgaacagcgtcttcttgatcgatcgcccctccttcttgagtattgtgcaggagaaggtggcctcgtccaggcccatctcgccccagatgcccaatatgggcggcagctgggaagataaaaaccgattagttgaatgtgtgcacacaaatcgaagacgccttacttaccaacagcagaaaggagacggcccaaacgaacaacagctgcagggttatgaacttaggcttatatatctgcgagtagcggctgtggcaagcgatgagtatatatctgccaggggattagggtgacggttgcggattagcttgcgacaatgcggactagacttgggcctacctgttcagggtgatgcccaccatgctgaggagtgaaacagccacattgccatagaagatcaccggaaagatcttgcacaatgtggtaccaaaagtccagctctgtcgttggaatcgagcaaattataatcattcactaattgtatattacattcacaggtataatgactcacctcctggaagaatcgcactgcggtcagtggcaggctgaaggagcagaagagcaggtcggagatgcttagcgaaatgacgaaggcggttgtggcatgctcccgtatcgtggggctcttgagcagcgccagcagggtaatcaggttgcctgtgcggcaattcagcatagagaaacaggttagctaatcgaggagctgaatgtgggatgccaattactcaccaagaacgccgatcgtcacaaagacacaggcactaatggccgcgaataatgtcgccgaatgcgggtagatcgattgcgtggcggccgccggttcatccatctgcatgtctgcgtcctgaaagtagcccgttgccatgcccatgtcctgatccattctgcgggggaaacaagcaaacgatgtgattagccaatttcaattacttatttttgaacaggaaaaggagctgtatcttttaaattggttgcattcaaatcgcttatgctaatcctattgtttttttttttttaatttgttagcccgtatcatgagtaattaaaaaggaagttaatagccggatgtagacaactcaatatgcatccgcttggttatttgaaaacaattaacttatgaagagaaatgaatgaaattaccattcctaattgcccagaagcatgatgcttttgttaagaagggattgttaagaatttaactatctaaacgaactaatgtgtacatttctgtgctccgcgataaaggaaatgtaatcagcaaaatcaagtttcaggcgcgtggaaaatctgtgaatgaatgaacgtacgagtaatacaaaaagataactaatcaccgctttgcggatgcaatagcccagttttgtcgtcggtgacaccgagtaaaaacccgatccgatcgacgggattagcgaggaagtctgcgtactcccaccagcttatcgcatccgagacatttgatttatgtaaacggattttgttataagatttctgccgagccaagctggccaactggcgaatcgtaatgatcgagccggtttgcacgccatttgaattcacatttgtacgaattttttttttatcaaaagttcgagtttttcaccaatttcctcatcaaccgagcaaggcaaacggctttgaataatatggtgttatatatacatatatcaaatcgctgctgactgcgtgattgatggccccaagattacatattatcgaatcaggattcagaaggagatcaatgtcaaatgcggacaggaacatgagagacgcctgttatgcgcaattaaaaatttgggtttaattgctgtggaaactgttgttggtggcatcttaagttcctgtttaacaacatcaactacttatgtacgtagaagcgtttaagccatttgcatacagatgagaactggcttttgtgctaatcagccaagatgactccgatgatgatgactcattacctgaccagttttcgctgctttcttttcaacaactacttgtatatgtattgtatccaatagcaatacattggatttccatggtctagtcacgtattatcatttaattgacgccaagtcgtgttattgttgagctatcgagttcagctcaaacatttcttattcccatgaataagccggcaaaaatatgcaatctatgaaagttaatataagcaaaccttactttgactcaataccaatgcactttgtgtcgataggttcacgcaattgaggcgattattccgataacccaagcgattgactgttcccgtttcgattccaattgaaatttggaaatgtacaatagttttgctatatgctgtcaagtacgctcttatcttctctgggttttcttcagagtttcgaaacgcttcttcttttttttgtttttttttttttggaatctcgtattttggaaggggctcccctctggaatttgttacactgtcgttatcattgcgaacaagcggcccgaagctatcagcgactttaacatttacaatgcacttttttacgaccaattaaatgtacattttcctttcttcgcccgttgataagcgaacgcgatgtggcgcaggcaatgtgttgctcttgcgacacaaacgcaatcaaaatggattcaatttcgctttttcccagtgaaacgaagaacgaaccgaccatcatgatatgctgctctgcatgttgcgtattgaatcaatgacaatttcaattaagccgcccgttcgtcatgcgttttcgtgggcttcgaaatgctgataacgctgctgtcctccaactgctttgcatgtggacacaattccatttatttaattcttttatttggatcggttaaattaaaaagcgccttgttacgcatttaacgttgtttccggtgcgtggtggtttcatgcttctgggaacggcaaatgggtttaggattgggaacccctcatcatccgtccaaatatggggagttcaaggaatggaggggggagggggggagggggcggagcagcggtccgctttcatgcatgatcaacatgtgtgtttgttttccaactctatgtgagttgtttcagttcttttcggtctcctcggttctactcagttcgttcttactttctggcttttgtttccgaatagggggagcgcatcgggccgcaactggaaatggaaatctgaatatgcatcccggagcatcccgtccgaaatgagcaccatgcgccatgccgtttcgtttaattccctacccataaatgcgtgtccaaacagcagagggcatttcaagaggtccaactattagctatgtgcatatataattctctagatatattaattcagctaaagtgctaaccgcgagtgtgccgccagttgcccctcaacagtttgcaacgatgatgatggcacagatatcagagataacactcagatcgcgcccctcacaagtatgctcattatgtacattcatatgtacatatgtacacacagctaagcacataaggaatacgatatgcgctatgtacatatatacatatttacatcaaagtcttatcagcctcgggttcccaccgtccaaaaaaaaaggcggaacgaagctttataaataatcaatcaacaaatatttacaatcaagtatttatgtagcgggcggaaagtcgaatgcaaataaggttagacgcatttgtacatatgtattttcttaaagggttcctctgatcaatatctgcccgtttttatctagccccgtttataaggctgtgaatgccccgattgtgttggtcgtgatatcaattaaatcggcataatctcatgtcatctttttaaacattatgatagataaaatgtattataacgactctaattacattgggattaaatgggttttcggaaaatacctatgcagtaaatcaaatttaagatcaatgtgcagttatttggggtttcttgagttaggacctctgttttaatattgagaattactcgatattatcttccgttttattttattttctgatcgtgtcggtgcacgagaaatacatatttcccacttttgttgcatttcgctgactaatcgaaagctaaataccaaataagtttccgatatggggggtatgtatgtacatacatacatatatagtacgagtatatataatatacactgaataagcccgagcatacatatgtacatatgtagatagtgcacatgtgtattgtggatcgttttggagctgggtttttctttgcttttcgtcgtttttaagagacttgagctgaatgagtcgctaccaactgttgcggtgggttaaagggtggggggagggggcgaatggggatgggggatgaagatgatgattcatgcagctgatgtttggacagggaagaaagaaagagcgaaagagaaagcaaatcggaagcggcggtatcaaacaatctgtttaaataacaacaaaagactttataagcctgactttcatttccatttccaatttatttttcccaagtctggctcattttgtgcaaataaacaaatgactcatttgtttaaaaattcgatgagactcaaggaatgtcacattcacaaaaattttcaatttgaaatctgaaaagattcaacagcataagcaaatgaatttaagattgcgatatttgggtattatccttaattggctggctgcctaatgtagatttgtttttctcggtgtaccgatgcatcctctttgcccatccacttctttctcccctctttgctgattttttttttttttgttttgtgagagggtggaattcgggatttgggatgtgagcgagaaggatggccatattttgaattgtggaaacagccgttccattatcgttccattacaaatgcacacacacacacacacacacgcgcgcgtgcagtttgcgcttctctgtgtgtgcgtttggaccaaatgcaataacaataaaaacgcgcaactcaaattgttaacaaaggtaaggccgtttttttggccggatttggattctggtcttgaaagagaaacacacacacacacacacgcacgcaaaaaaccaacgaaaataataacaaaacaacaactcacccgaactcgaacccgtttcactgttttccgcttattataaatttatacttcgtttggcgtttcttaaatgctttcgaattgcattttggatttgacattaaatcgctccgcgcagcacagtaacaaaaataaacggaacaaaataaatacaaccagccgattctggccttctcacaattccgacttttgaattatcgaaacagaagcgctgcttgggccaactaagccaacttaactaaccgatcgcagagcgcaaagtgtcgtattttcactgtcgtcaattaacaacagcggcaacaagaacaacaaacgaaatgagcggctgggctacagttttttagtccgagcgcgatcgaacatgttggctgcctggcaacaagttcgatgcgaacttttctattgatctaagaaatcggcgttctatcgattgacgcgctgcgcaggcgcctatcgatttttgaaattctaagcccgccttaaaggatatttgtagaaaagtagcttgcaaagaaattaaattccttgaaataaaaaagaaatttagtactctcgttctatactcacttctattcacttgcggttagttagttagtttttaatgccacatttttatgatgatgactttttttcagctcatctatgcgcaatcaattttgcgccaagcgacagctgcacatagtttcttttgaccaagcaatcatttatcatataattttccaagtagtagtgccaagttcataactgatggagtgtgctgccaatttgcatgttgtggagccattcagtttcaaggtcgcgctaattaaatactcgttacaagtgatgccaaatgtataaatatttgaacagaacgtattaaattaatattatccactaagagcactattttaaattcttaaaaaccagatgcacgtcaaatagatgtacataaaaagtatatttacttacaaatatcatacacggacctgttttattcctcatcactggccattagttgataacatgtggacttctatgatatcctgctgcatttttgccgtttagtcaggatttagagcttgtacacaatgcgacagctgaaagggcgaaatcggtgcaatcgtgctgttcggcatctgaaagttcagggcaagatgtggttgaaaaatcttaaaagcggtttggaacaaattcgaggtgaatctatccaaatcgttagaatcccatgagtacgttcatc

SEQ ID NO: 17 - DNA, 1399 bp, Drosophila
ggcccaagcagcgcttctgtttcgataattcaaaagtcggaattgtgagaaggccagaatcggctggttgtatttattttgttccgtttatttttgttactgtgctgcgcggagcgatttaatgtcaaatccaaaatgcaattcgaaagcatttaagaaacgccaaacgaagtataaatttataataagcggaaaacagtgaaacgggttcgagttcggaatggatcaggacatgggcatggcaacgggctactttcaggacgcagacatgcagatggatgaaccggcggccgccacgcaatcgatctacccgcattcggcgacattattcgcggccattagtgcctgtgtctttgtgacgatcggcgttcttggcaacctgattaccctgctggcgctgctcaagagccccacgatacgggagcatgccacaaccgccttcgtcatttcgctaagcatctccgacctgctcttctgctccttcagcctgccactgaccgcagtgcgattcttccaggagagctggacttttggtaccacattgtgcaagatctttccggtgatcttctatggcaatgtggctgtttcactcctcagcatggtgggcatcaccctgaacagatatatactcatcgcttgccacagccgctactcgcagatatataagcctaagttcataaccctgcagctgttgttcgtttgggccgtctcctttctgctgttgctgccgcccatattgggcatctggggcgagatgggcctggacgaggccaccttctcctgcacaatactcaagaaggaggggcgatcgatcaagaagacgctgttcgtgatcggcttcctgctgccttgcctggtgatcatcgtttcgtactcgtgcatctacattacggtgctgcaccagaaaaagaagattcgcaaccacgataacttccagatcgcagcggccaagggctcctcgtcgtccggcggcggatcctacatgaccaccacatgcacgcgcaaggcgcgcgaagacaatcgactgaccgtcatgatggtcaccatctttctgtgcttcctcgtctgcttcctgccgctaatgctggccaatgtggtggacgacgagcgcaatacctcgtacccctggctgcacatcatcgcctccgtgatggcctgggcttccagtgtcattaacccgatcatctatgcggccagcaatcgcaactacagagtggcctactacaagatctttgcgctgctcaagttctggggcgaaccgttgtcgccgatgccgagtagaaactatcaccaaagcaagaactccaaggagctgtcgggcgtcatccgcagcacgccgctgtttcacgctgtgcagaagaatagtattaaccaaatgtgccaaacatattcagtatga

SEQ ID NO: 18 - protein, 386 aa, Drosophila
MATGYFQDADMQMDEPAAATQSIYPHSATLFAAISACVFVTIGVLGNLITLLALLKSPTIREHATTAFVISLSISDLLFCSFSLPLTAVRFFQESWTFGTTLCKIFPVIFYGNVAVSLLSMVGITLNRYILIACHSRYSQIYKPKFITLQLLFVWAVSFLLLLPPILGIWGEMGLDEATFSCTILKKEGRSIKKTLFVIGFLLPCLVIIVSYSCIYITVLHQKKKIRNHDNFQIAAAKGSSSSGGGSYMTTTCTRKAREDNRLTVMMVTIFLCFLVCFLPLMLANVVDDERNTSYPWLHIIASVMAWASSVINPIIYAASNRNYRVAYYKIFALLKFWGEPLSPMPSRNYHQSKNSKELSGVIRSTPLFHAVQKNSINQMCQTYSV

SEQ ID NO: 19 - DNA, 3574 bp, Drosophila
gttcgtttgatcggttgacctcgatttatttactgctatgcaaagctaaaattcaaaaatccctactcatagatgaagttttttgcacactttaggtgtaacttggtgctttaacttggcgtttctagtcttaaataattggcaagattatctgcctaacttttggtgaccccaacttttaatcacacaccaagcggaattatactaaggtttatttcccttggcatcagactgtcttcttcttcgctcttccagctcttgtctttattaaacctggccaaggacctgtaacttcgtttaattaagtaattcaatgaaattgacagctgtttgcttgggtcaagcataattgatgactactcataatcaaaacagaagtgctgccaatgaatgggaagcggaagtctggcataaattacaggtctgtccatccgaagcgcaatcatcatataattgtcatggaaccacacttggcactcacttttgcctggcttctgctcctgcgaacgctgatgttgctttgtgctttgtgctttctgcttgatgctttttgctttgtgcccaagtctcgtgactccactccactcggagtggcatccatggttaggagaacagcaataatgaggcacaccaaccggccaattggcaattgtgcgaggtcaaacacaaccggtggaggaaactggtgtcggccgcacagggaagacttaaattttctttaattgctcgaatttatgggttggtagtggcataacgacaattgtccaagtcaaggtcacaaatgatgctcctgcctttttagttcgatacacacaaagaaaaggggaccatacatatacaagcaaccaactagatgaaacctattttaaggacggttgaattgttggcttttaacatagtagattaacttcaaaattagcagttactactactaataacgagctaagccactcatttgcgtaaacactttctatctgtgcacttttatctgcttgaatagtgtctgggtgatggcctcgattgccgtggttggcaacctattggtcctgctcggtcgctacttctacaaatcacggagcaacgtggagcactcgctctaccttcgccatttggccgccagtgatttcctcatgggcatttacctcacattgattgcctgtgcggatatcagttttcgcggcgagtatatcaaatacgaggagacctggcggcatagcggcgtttgtgccttcgcaggtgcgtatccttcgacatcctagccatttccatttcgtaatggaatgctaatgtgtattacgtattcgccgtgtaggcttcctcagcaccttcagctgccagtcgtcgacgctgctgctcacattggtcacctgggatcgtctgatgtcggtgacgaggcccctcaagccacgggatacggaaaaagttcggtaagtgtgaactacaatagatatgtaataaagtgctgggcaaagttattgtttattctattacattaattacttttgctgcggacatttgctgatttgttgactgctcaaatatcaatgcacagaatttgtttaccctacttgaattttgttcgtaaatgcaattatgtttgttttgaccgccgccttactatgtacaatatatattttctgttgcttcattttagtttgcaaaagctatggttttgtatgtgtaagctatgataaattattgaaatgacaacttccacagcattgtcctacgccttctgctgttgtggggcataagtttcggattagctgcagctccacttcttcccaatccgtactttggtagccatttctacggcaacaatggtgtctgcttatcgctgcatatccacgatccctatgcgaaggtaatacaccatttccttggaaacgcctgttctaatattccaaaatgtatatttttagggttgggagtactcggcgctgctgttcatcctggtcaatacgttgtcactgatcttcatcctcttttcctacattcgaatgttgcaagcgataagggattcgggtggcggaatgcgaagcactcacagcggtcgcgagaatgtggtagcaactcggtaagtttggataattcaagtaaaatgatttaattattgaaatatcatgtttttacagctttgccatcattgtgaccaccgattgcgcctgctggctgcccataattgtggtcaaattggctgctctttcaggcaagttcatcggcaacgcctttaaatgatttattttgattatcaacttattcgtatatatataacccctttcaggctgcgaaatctcgcccgatctttacgcctggctggcggttcttgtgctgccagtgaactcggccctcaatccagtgctctacacattgaccactgcggcctttaagcaacagctgcgtcgctactgtcacaccctgcccagctgctcgctggtgaacaacgagacccgatcccagacccagactgcctacgagtccggactgagtgtcagtctggcgcacttgggcggtggtgtgggcggcgggtcggggcgaaagcggatgtcacaccggcagatgagctatctgtaggcgggcgcaactggcttaaaatgcagcacgagatcaacagactggggctagtgggtgggtggcattacaacaggacacttccatgtaattggtcccttagactattggtattatacgtacttattgatacttattctaatatcaattttaaattacttataacatttgaggatatgataacataaaccttagacaagagattccagctatttaagtttcttttttgtatattatttattttaccaatcgttttaaggcaaacctcttacaactgtccaaagaatatcctaactatttgttgcatccccatttattcgacctgcccaatgggatattgttacatgtgatctaatagttaaatcaaattttaattttataaatacatattcagatgttaattgaagcttttgaacataggacttgcaatcgaaggccgcaaatgcctgccatccggctttctatgcgttgccctgaggttcagtggctacatcgagatccgcctggacgtgatagggtccctcgttcacataggccgtgaaacggatggtttcggtgggcgaaaactcagcgctagcggacagaatctccataatttgccacttcatatacttaatgtccctgtgcagatccttttgacgcgaaagaaggaactccacagcaccgccggtattctttagagctacaatgccccagttgtacttacaaatggttttcaagaacgacaaggcggccatttgaagatcggggaacggagtgtttatcaggtccataatgatattagcatgcgctcccccagcgaagcactcgtaccagtttttaccaatgttactgaaaaagaagagaatcattagaagaaaaacttcaattatagagttaagcattacatgatttctgtggcaggcggcgtcttgaagtcataaatcacatccagggagttgagcagcctcttcttgatgtgcgccgatagcttcttagtatgcgagccatacttcttaaagga

SEQ ID NO: 20 - DNA, 1015 bp, Drosophila
tgtctgggtgatggcctcgattgccgtggttggcaacctattggtcctgctcggtcgctacttctacaaatcacggagcaacgtggagcactcgctctaccttcgccatttggccgccagtgatttcctcatgggcatttacctcacattgattgcctgtgcggatatcagttttcgcggcgagtatatcaaatacgaggagacctggcggcatagcggcgtttgtgccttcgcaggcttcctcagcaccttcagctgccagtcgtcgacgctgctgctcacattggtcacctgggatcgtctgatgtcggtgacgaggcccctcaagccacgggatacggaaaaagttcgcattgtcctacgccttctgctgttgtggggcataagtttcggattagctgcagctccacttcttcccaatccgtactttggtagccatttctacggcaacaatggtgtctgcttatcgctgcatatccacgatccctatgcgaagggttgggagtactcggcgctgctgttcatcctggtcaatacgttgtcactgatcttcatcctcttttcctacattcgaatgttgcaagcgataagggattcgggtggcggaatgcgaagcactcacagcggtcgcgagaatgtggtagcaactcgctttgccatcattgtgaccaccgattgcgcctgctggctgcccataattgtggtcaaattggctgctctttcaggctgcgaaatctcgcccgatctttacgcctggctggcggttcttgtgctgccagtgaactcggccctcaatccagtgctctacacattgaccactgcggcctttaagcaacagctgcgtcgctactgtcacaccctgcccagctgctcgctggtgaacaacgagacccgatcccagacccagactgcctacgagtccggactgagtgtcagtctggcgcacttgggcggtggtgtgggcggcgggtcggggcgaaagcggatgtcacaccggcagatgagctatctgtag

SEQ ID NO: 21 - protein, 334 aa, Drosophila
MASIAVVGNLLVLLGRYFYKSRSNVEHSLYLRHLAASDFLMGIYLTLIACADISFRGEYIKYEETWRHSGVCAFAGFLSTFSCQSSTLLLTLVTWDRLMSVTRPLKPRDTEKVRIVLRLLLLWGISFGLAAAPLLPNPYFGSHFYGNNGVCLSLHIHDPYAKGWEYSALLFILVNTLSLIFILFSYIRMLQAIRDSGGGMRSTHSGRENVVATRFAIIVTTDCACWLPIIVVKLAALSGCEISPDLYAWLAVLVLPVNSALNPVLYTLTTAAFKQQLRRYCHTLPSCSLVNNETRSQTQTAYESGLSVSLAHLGGGVGGGSGRKRMSHRQMSYL

SEQ ID NO: 22 - DNA, 8412 bp, Drosophila
ttttccgccaaattcgctggcttttaagtgctcacataaatgaaattttcaaatagcaaataacataggaataatccttctaaatcgcaatataaaaacatatatacaaggagtggtaaatgacagtattctattaatggcaaaacgatttatttaaacagacgtcgcatccgcataaacgatctttcacactttttattaacggttagtataaataaaaaaaaacattaatccttagtttatttaaccaattttgtttgctgaaatcgattcttgaaagagaagctgacattttttttatatatgcctccctacttcaggcagtgcgaacataccgcatcaacgcgacttgtagcggccgtgtgaaaaggctattttgtggttagcgcagatctgcgctgcagtgtgaccccggctacaggtatttcggcatcgcacagggtcacactcgcccaggcacccgtataaaatccccgcccccctgatcgacgatagtatttcgaaaaaaacgcgaggaaaagtctgatgcgcgttaaaatcggagcgcaaatcgtgcatatatttttttttacacaccgcgcgccgtgtttacgactgaaaacggagactgactgaaaagccttggcgcacaagcacgcaatgaaaacgcaacgataagaatgtgatattgtgataaatacatgattcgctgacaactctattttatattggaatgcattcgaaatcgaacgcagcgcagcgtgtgttgtttacttaacgattttcggtgtttgtttgcccaacttgcggcggtgaaattcagcattttctgattttccatttgccaacgaaagagaggaaaagtgaaaagtgctattcgacgaagcgaaacggaacgcaaaatcaaaagaaaaacagcatagctaaagctatgtgtagtacatagccacataaattgcaaattgaggccaagagacaagagaacctgaaatccacacagatcttgacgagtgagctaacgatggacaggagtcggagtagcagagctgccagcagcaaccagttcatcaggccatgtggcctactgacgaccgtcatcctgctgcagacgcttgtgtcgatgagtttggccatcgaggagatgtcgccaccaccggccgccccgccacgtccatcgccgccgcccaccgtgaagctcaacaagtgctgccattcgggcgagtatctgaacgatggcacctgcatcgccggcagcgaagccctgtggctgcccatggtgtacttggtgcagcagcagcgcttcttcgagccccatggcgccagtccgcgattcttgaagttcctgcccaatacgagacccacgtgccgaaaggaccagacgacggagatctttcgcagccgcggagccaatgtgatgctctttcccaatggcacgctctatgtgcgggaacgcgctctaatggtccagccgtcggattactgtgtcgactgggaggtggccgtcgtttgcttgaacgacagtcagccgatcaatgctctggaggatcccgattatgcagccaatcctctcgtgcagcaggagccgcccaaggctagcctgcgactgagcaagtgctgcggcaagtggggcagctataacacgcagctccagaactgcgatctgcagcccaaccatcaggcagccgtcgatggactgctgcgattgtcgccgcagctaccggagggcagctatcagactagctacggcctgcccgactgtggccaacccggtggctactccattgccggtgattggcaggatgccaagctggatcggaacacggccatgctccagttgccgcacaagaacctcagcgccggacaatactgcctggagcacacgcagcgcgagggcgaggtgaagatcatagcctgccagcatttgtttagctccgcggcaggagccggcatccacgacggctccattggaggcaccatcgagcaggccaatggccagaatctgcagaaggccgtcctgactggtggcatacttgtgtccattgtcttcctgtccgccactttggtggccggcttcctgctgcccgctgtgcatcatgcgcttcattggcgctgccaaatctgctatgtcacctgcttgctattcggcaaaatactgctggccatcgaggagctgagctccagcctgcagccgggcagtgccgcctgccatacgcttgctatcaccatgcagttcttctttctggccgccttcttttggctgaacaccatgtgcttcaacatctggtggacgttccgggactttcggcccagttcgttggaacgcaatcaggaggcactgcgtcgctatctgtactccctgtacgcttggggcggtcctctgcttatcaccttcgtggccgcctgcgtggaccagctgccggagacgacgctactgcgtccgggattcggacagctctactgctggttcgacaatcgcaatctctcgatcttcgcctacttctacggacccattggcctgctgctgtgcgccaatatagcgctcttcgtgtccaccacccatcagttgacgtgcggcctgtggaaacgggacgatgtcaagtcctcatcggagaagtccgccctgggacgcgtctgcctgaagctagtcgtcgttatgggtgtcacctggatagcggacattctgtcctggctagtgggtggaccgcatggcgtatggttcttcaccgacctgatcaacgccctgcaaggcgtcttcatcttcatcgtggtgggctgccagccgcaggtgtggaccgcctgccgcaggatcttctgtccgcgattgcgtcatgacatcaccaatacgaccaacggtgtccagcattcgagcagctcgcagggtttgccctcgatggccggcggcacggagattacacagaacaccaccaccaccaccacgacaaccaacacgaccgccactcacatgcccagcaatccggcggaggatgaggtaccggagaaggctcccattgcccccgtcgcacccatcgtcaaaatggagaccatttgctaaacgtaagttgaacacccgatagccaatgaagtgtgcttgtaaagagatagctctgtttgccagcgcgcaaacaaagcgcctgctgttcccactcccagcgcagtttgccaagtggcttacaaaacgcggctttaagcacacacacacacacacacacacttgctgatagacttatcggccttaatgggctttagggcccagccgggaatgcaaagtatctcaatgagctggctggctggctggctggctgtttgctcgccggttacgccatgcatcgcagcagtttcgatcctataaagcgcacgtatgtacaggtggggccacttcaatatcactaagcagctttagcttcaatagacttcaatcggtggaaggtttggtatttggacccaagaacctaagtttcttattaagttttagtctttcaaaaatagcgtgctaaatagagggtcttaaattaactcgaaaatgatttagaatccgtgtaaattgaattgacacattagctgaattttccggtatataaccaaaaatgtccggacgatatatgtgtcgtagaagatagtgtgataattgcgctgtctgtggatttaacccaaataccaatgaggtattcacaaaatgtgaaaacaaataggaaaccccgaatttgtcatgcgccgacaactttcgagaaccaaccaccaccatatgaagataaaaaacaaaagaaactagtttggttttctatgggggaaaacgatacgaacttttcaattcaaaacctttggagtttcaacggtcaatggccatgttggaaaatacccttctctataggacactattcatctcacaccccccatgtggactatacgctatccagatgaaatttaagggttcgagatttcctgacaacttgcggctacctggagcgtttttccaaccaggcgccggttgaaaaagtctagcacgttttcgtttcgttttatggttttatagggggaaatttacgtatttacgtaggataagaagatcgtcctgcgatggtcaaatagtgaccatattcttcatttgcatgaccgaaattgtttaacaacatgcgccaagtttacgatttcgcgtgcaccacttgagttcgagtatggtcataaagatgaaaatgttgccgctgtgtgccgttatgtttttcatcggaaaactctgacgccgggccgggcgaattcgatttttgaatttcctgtcgatttccacatttccacatggccataaagtaatcagcgcaacccttgacacacacgcaagcgaagataatggaaatcgttgctggcatccgtatcggttggattcaaaaaatgtgtgttgccgaatccgtaagggaaaatcgagtttaaattggactcaccggcgacgatggcgatggtgatggtgataagcacacaacacaccatcgtcttgtttggatttcggcccatttacttatttacttgttactttgttagtttgttagtttgttagtttggtcgcctcgagtggttttgacacatctcccaaatgatccaatggcaaacatgcggacaggtctcgaactcggcacaatctacaattatctaaaaagaaacctctgtgcggcgatcataaagttttgaaaaacaataattccattttcgggcactaaaaaaaaaacagggcaacttgaaatctagcattaaactggtggcttaatgttccaatgaaaagataaggatttaacaataaaaaaaaactttttttttgtatgcactgcatgttgatagcaacattaatgaaagaaactaatcaatgaagtttctgtttctctatattaacaacaaatgctgctttgtttaggccatgtttttgttattagagcccaagaaacattggtttgcattgcacaaaggcgtatggaaaatgtgtaattacttcagtttgtaacattttcgaatatgacagctgctggtggcagttaattctttgccctcgcgttttattgtttgttactttttacttttattttttatttttttttttgggccctgatcgcgtcatactttttgggatgcgtgtctgtccgggtgaacagatgtgctgtctgtctgccattcgcttgtgtgtaggtccgtgttggaatcagaggttttgcccaaacgaaagagaaaacaaaacaaacagtgggtttttggcccatgggcccattcgatgagattgcgcaaccgagttaaatggcctggcccctgaaaagctgaaaaccgaaaacagaaacatgaaatctgaaatctgaaattgtggaaatctgaaattgtggctggcacacgcaacactcgtaatcagactaaaaaaaaaaggggcagtcagtcggcttaaaactgtgacctgcatgcatttgccaactgcagactgcaaactgcaaactgcaacttcgaaggcaacccgaaatgcatctgcaactgcaactgcagctgccgtgccatttgtgttcatctacataatcccagagcagcgtgtccacgtcacgctcatcacaacgcgacggtgcaaaaatgcagcgaaattggatgcgttgctcgtttgtcaactgaaatggtccagatgcacaatgcaagggagggaagatgcggcagaaatgcgccggaatcgatgcagtaatgcgtttcaagctatcattatgggatcacatggggtcacatcagtgcgaaaatgctaatgctatatgggctaaaaccagttgggaattagagcgccgtacaagctgtaagctaagctgatatgcaataccgcttattaaagagcatttaaactatttgacttgaaaatatgactaacaaattgagcagggaaaatgcttttccttcggaaaaaatgattgtgtgccaaaaactaaaaacgaaagtttccctactattacttttggcatcgcccaaaaaacactttctttcattagccatttcactgattatcttttttggtaaccaagcggagtaatcatcataagcacacagcgttaaactattcagctatttccagcttgttgagataactaaaagctcggacacgcttgagttccacttttttttttttttttttatctccatcaacatttaataattaagtgatttcgcttattgttctagtatttattagcgcattacctaattgtttgacacgacgaaacatgaaatgattactaatttcatcatagaatgccagtgacccatgctcgttggcatttcgattataataatattcgcagttgcataaatatagattgtttccgaacgtgacctgtacttcctagtgcaactgaatcttttgcgtttctgggtcagcttttatctgcctagttcgctgacatttcaaaagtttgcaacacttggcagcttggcagcgtaatgaattccttcctgttgactccgccacgcaaattggcacaaatttcgcaataagaatacttaatgtccaactccagacgcaatcgcagcggcacacgcacacatgctctgcgttaatttgagtttagcggcaatttttaatttgaacgttctgcagtttttcaacttataattgcactctggcccatttacattttacgcagggcattattattatttctttttttttttttaatttttgcctgctgagtcggtcgacatcggattcctcgttggaggccgaaggaagcgaagtagggggcattgttgtcatgcatccacagttgcggttaatgcaatagctctgagatggataataattacctcggtccttgaatggtgcgaaaatatcttggcagttcctataaaagcatagcattgcgtttggtacatgaatttcattggcaaataataagtatttcatctggcagcagttcacacctcaaatcatatcgcgcaaatgccaccttttcgcaagaatttgaaatcaaaataaatctcagaattcctgattacgcgatgcctggaaatctaaacagatcatgagtaagccgcaaatgtttcagctaagaaaaatgaaaagaacaaagtttccgctaagggtagttggaaaagtagtcaaattggtttactgatcaatattacttttagatctctctgttgttttatttatttagcagtgtaaactaagactgcaagtccatgaactatagccattttcaacactgcttctaagtactaatgtcttgagtgcactgtacccacatgcgcacgcatatcatatgaaaatttgtacttatttgtgccccttttctttcttatttttttttttgcagacaactgagacgacgagcgacaatgcgaaagtcaggcccggatacaaaagtccagacctcgagcgagcgaaataatggcaatgggcagctcagaaataagaaagaaagaatggaaaaaacacgaaaaaaaaacgctgccaaagctggagtttcgagacgagcgcggcacacacttgcgcaatcgcagcaacaaaaccaagctgaccagctaattgtgcgagtgtacgagcgaatgagtgtgtgtgtggttgtgtgtgtgtgcaagcgacttgcgcgtgattttgaaatcggccaacaaccgctggggaacaaaacgtactcagtatgccagtattcaacttcaatttaagccagcgcacaaaagaaacgtattattttattcatcatcatcatcataatcgcatagcatcgcatcgcatcgcatcgcatcgtatcgcagaataacggtaaagcagttcgggtcacattaacacgttctaattggacactccggtcagtgttgcgaaatggaatgtgcagcataacgaaacaggaattcagcctagacaaaacaaagcagcgctattgtggctctttctttcttttaagcacttttagccaacagaaataaaaacacgagggctttatgtgtgtgcatctggctgtatgtatgtgtgtggcaaccacaaggaattttctgttgaggcacttttgttgtttagtttagatcgcgttgctctggtttttttttttttactcaaatctcaagtgtgagaaaaacagcaggcgcaccacacacaaacacacacacacatgcatgcacatatcggatgtttaacatttaaattagctgcttctgattggcattttcggtatgacactgcttgcattcagttctttatgtgtgggtgtgtgtgtgtgtgtgcctttgacgtttttattgcctaatcacttttttttatttgcactttactacgagaatactggacgaaaaccgctgactggaactatttttatgtttgccccataatgtttttcaaccgaaaaattgtatattttttttttacgtctagtgtaaacaattgaaatttatttacttcagggcataaacaaaatcgttatacacacacattgataggcg

SEQ ID NO: 23 - DNA, 2153 bp, Drosophila
atggacaggagtcggagtagcagagctgccagcagcaaccagttcatcaggccatgtggcctactgacgaccgtcatcctgctgcagacgcttgtgtcgatgagtttggccatcgaggagatgtcgccaccaccggccgccccgccacgtccatcgccgccgcccaccgtgaagctcaacaagtgctgccattcgggcgagtatctgaacgatggcacctgcatcgccggcagcgaagccctgtggctgcccatggtgtacttggtgcagcagcagcgcttcttcgagccccatggcgccagtccgcgattcttgaagttcctgcccaatacgagacccacgtgccgaaaggaccagacgacggagatctttcgcagccgcggagccaatgtgatgctctttcccaatggcacgctctatgtgcgggaacgcgctctaatggtccagccgtcggattactgtgtcgactgggaggtggccgtcgtttgcttgaacgacagtcagccgatcaatgctctggaggatcccgattatgcagccaatcctctcgtgcagcaggagccgcccaaggctagcctgcgactgagcaagtgctgcggcaagtggggcagctataacacgcagctccagaactgcgatctgcagcccaaccatcaggcagccgtcgatggactgctgcgattgtcgccgcagctaccggagggcagctatcagactagctacggcctgcccgactgtggccaacccggtggctactccattgccggtgattggcaggatgccaagctggatcggaacacggccatgctccagttgccgcacaagaacctcagcgccggacaatactgcctggagcacacgcagcgcgagggcgaggtgaagatcatagcctgccagcatttgtttagctccgcggcaggagccggcatccacgacggctccattggaggcaccatcgagcaggccaatggccagaatctgcagaaggccgtcctgactggtggcatacttgtgtccattgtcttcctgtccgccactttggtggccggcttcctgctgcccgctgtgcatcatgcgcttcattggcgctgccaaatctgctatgtcacctgcttgctattcggcaaaatactgctggccatcgaggagctgagctccagcctgcagccgggcagtgccgcctgccatacgcttgctatcaccatgcagttcttctttctggccgccttcttttggctgaacaccatgtgcttcaacatctggtggacgttccgggactttcggcccagttcgttggaacgcaatcaggaggcactgcgtcgctatctgtactccctgtacgcttggggcggtcctctgcttatcaccttcgtggccgcctgcgtggaccagctgccggagacgacgctactgcgtccgggattcggacagctctactgctggttcgacaatcgcaatctctcgatcttcgcctacttctacggacccattggcctgctgctgtgcgccaatatagcgctcttcgtgtccaccacccatcagttgacgtgcggcctgtggaaacgggacgatgtcaagtcctcatcggagaagtccgccctgggacgcgtctgcctgaagctagtcgtcgttatgggtgtcacctggatagcggacattctgtcctggctagtgggtggaccgcatggcgtatggttcttcaccgacctgatcaacgccctgcaaggcgtcttcatcttcatcgtggtgggctgccagccgcaggtgtggaccgcctgccgcaggatcttctgtccgcgattgcgtcatgacatcaccaatacgaccaacggtgtccagcattcgagcagctcgcagggtttgccctcgatggccggcggcacggagattacacagaacaccaccaccaccaccacgacaaccaacacgaccgccactcacatgcccagcaatccggcggaggatgaggtaccggagaaggctcccattgcccccgtcgcacccatcgtcaaaatggagaccatttgctaaacacaactgagacgacgagcgacaatgcgaaagtcaggcccggatacaaaagtccagacctcgagcgagcgaaataatggcaatgggcagctcagaaataagaaagaaagaatggaaaaaac

SEQ ID NO: 24 - protein, 676 aa, Drosophila
MDRSRSSRAASSNQFIRPCGLLTTVILLQTLVSMSLAIEEMSPPPAAPPRPSPPPTVKLNKCCHSGEYLNDGTCIAGSEALWLPMVYLVQQQRFFEPHGASPRFLKFLPNTRPTCRKDQTTEIFRSRGANVMLFPNGTLYVRERALMVQPSDYCVDWEVAVVCLNDSQPINALEDPDYAANPLVQQEPPKASLRLSKCCGKWGSYNTQLQNCDLQPNHQAAVDGLLRLSPQLPEGSYQTSYGLPDCGQPGGYSIAGDWQDAKLDRNTAMLQLPHKNLSAGQYCLEHTQREGEVKIIACQHLFSSAAGAGIHDGSIGGTIEQANGQNLQKAVLTGGILVSIVFLSATLVAGFLLPAVHHALHWRCQICYVTCLLFGKILLAIEELSSSLQPGSAACHTLAITMQFFFLAAFFWLNTMCFNIWWTFRDFRPSSLERNQEALRRYLYSLYAWGGPLLITFVAACVDQLPETTLLRPGFGQLYCWFDNRNLSIFAYFYGPIGLLLCANIALFVSTTHQLTCGLWKRDDVKSSSEKSALGRVCLKLVVVMGVTWIADILSWLVGGPHGVWFFTDLINALQGVFIFIVVGCQPQVWTACRRIFCPRLRHDITNTTNGVQHSSSSQGLPSMAGGTEITQNTTTTTTTTNTTATHMPSNPAEDEVPEKAPIAPVAPIVKMETIC

SEQ ID NO: 25 - DNA, 3187 bp, Drosophila
gaccagacaagtgcaagcaatggagctcagcgtcagtatccactgtctcacacacatccacaaaagcatcttcatcagattcagttcctcagatctcgcatcagctgctgcgattcccatggacgtgacacggtggagcggtggagaaaacatcatcataataataataaagccgaataactttctccacacgtagtgtgtgtcaataaatcggttgtttctcgcagagtttgaaaggaaacttttagagttcttaaacaaagaatgtggttttggaaccactgtgccgcatcctgtctgccatgaatgatgcgtcctttcctgccagcacataaagccccggccagttgcatctattccacacactgatagacaatgtttgtgcactgatttatactcagccagctattaaataagaattttcgttattacgctgccggggattttattatgtgactttcaaaagcccccgccaacttgttgtggctttggcttaaagccgcgccaagctgaaaattgttattttaaccttttaaagtcagctttatcagcaccaaatgcagggccattatgcgtggcccacgcggcgtatgagcaacgttaaatctgcgaataattcaaagacgtgcgtttctttttacagccgccttgtcggtaatcccattaaggagttatctggcgaaacatttttgcacaacactcgactggaggcactgtgagtatactttgtttgttttaatttaaaaaatcacaaaatatatcatgaagttgttaaaacgggattgaatttgatttgaatatatgatttcatttaatttctcaccaatatttaagttcgttggccctaatgccgattcacatcagcagcagtttaatggagccactgaatatatcgtttttgaatctcacgggaattcggtatgatcacatcgacttcgaggccatcaattcaatgcgcaacctgacgtacatcatctacgatcgattcttctactgctcaatgacgccgcgggtgagaatgtgcaagccgtccaccgatggagtcagctcctttcaagatcttctgagcaaaccagtgttacgttactccgcctgggtgatggccacgttgacaatagctggaaatgtgctagtcctatggggacgctttatctaccgcgatgagaatgtggctgtgacaatggtgattcggaatctggctctggctgatatgctgatgggcttctatttggtcaccattggagtgcaggactatcgctaccgcaacgagtattacaagtaagtcaaatgtgatggattggcatttgttacgccccaatcttttagggttgtgctggactggataacctcgtggcagtgcacactgattggaacgctggccgtgagctcctcggaggtttcgatgcttatcctggcttttatgtcgctggagcggtttctcttgatcgccgatccctttcgcggccatcgcagcattggaaatcgggtgatgtggctggctttgatttgcatttggattacgggcgtgggcttggctgtggcaccggtgctcctgtggcggaccagtaccctaccctactacggatcctattccggaacctgtgagcacaatgtttatgataaaatgtagtttaccaagtgacgaaattaaacttaacaggctttccattgcacatccacgaggccttcccgatgggctggctttactcggctttcgtgttcctgggcgtcaatctgctgctgctggtgatgattgcgatgctctacacggcactccttatttcgatatggcgaacgaggagcgccactccgctcactctgttggattgcgaattcgctgtgcgattctttttcatcgtgctgaccgacttcctgtgctgggtgcccatcatcgttatgaagatctgggtttttttcaactacaatatctccgatgacatctacgcctggttggtggtctttgtgctgccacttaactcggcggttaatcctctcttgtacaccttcaccacgcccaagtaccgaaatcaaatcttccttcgcggctggaagaagataacttctagaaagcgagcggaggctggcaatggaaatgtggccaccacaacgacgggcacggcaactggatcctctcagcatccggatgacttcacgatctttgccaaagccgcgatgagatgccattaggtcctaacgctgtcgaactgaaggattcttgtggcgcagatcgaacttgtataccaccagatttagcagcatttattttgtctatgatatcgaaaatctatatatgtatgtgaatatctatccctgtccgtgtaagataaccaaatgaaagtgtgaaataaattgaatgtgatatttgtaaggcaattttacggaatttaaaatgggatgcgagttagtgtaagattaagctattatctaagttttggtaatagttttaaatactttttatttagaaatagcagcgctatcatttttggcatggtgtgattctttctggtccgagtaaatctttgccattaccaacttggagcgcacgatgtgaaactttcgcatttcctccaggtcctccatctgcaccaccatgttatgcttacgctccaggtgcatgcgtagtctaaaaaattattaaggagtgttactttcaaataatgtacactttaaacaaaataactaacttgttacgagctggatagctctgatggcagtgggcgcactcaaatggcatggccgtatgcgtgcactcgtgattcctgagagatgaagatgaggtaaaggacttctggcagccgggaaactcgcaaatgaagcgagatccagagtgcttaacctgctggtggacagtcaaatgggatcgctgtgcgaaacgacgatcacagagatcacaggaatagggaaagtctctgttatgatagcgtttatgaatctccagggctttggcaatggcaaaaaccttgccgcatgtgtcgcagtggactccagactgcctgtgcttcgaatcgacgtgaactttcagcgcctgctttgtgaggtaaacccggtcgcactggctgcaacgaaagttgggacgattggccaaatgaatcatctggtgcttggccatgcgggaatggttcctgaactccttgtggcagaacttgcagttggattttcccgtatgccgattgcgtggcacaatgtc

SEQ ID NO: 26 - DNA, 1080 bp, Drosophila
atgacgccgcgggtgagaatgtgcaagccgtccaccgatggagtcagctcctttcaagatcttctgagcaaaccagtgttacgttactccgcctgggtgatggccacgttgacaatagctggaaatgtgctagtcctatggggacgctttatctaccgcgatgagaatgtggctgtgacaatggtgattcggaatctggctctggctgatatgctgatgggcttctatttggtcaccattggagtgcaggactatcgctaccgcaacgagtattacaaggttgtgctggactggataacctcgtggcagtgcacactgattggaacgctggccgtgagctcctcggaggtttcgatgcttatcctggcttttatgtcgctggagcggtttctcttgatcgccgatccctttcgcggccatcgcagcattggaaatcgggtgatgtggctggctttgatttgcatttggattacgggcgtgggcttggctgtggcaccggtgctcctgtggcggaccagtaccctaccctactacggatcctattccggaacctgctttccattgcacatccacgaggccttcccgatgggctggctttactcggctttcgtgttcctgggcgtcaatctgctgctgctggtgatgattgcgatgctctacacggcactccttatttcgatatggcgaacgaggagcgccactccgctcactctgttggattgcgaattcgctgtgcgattctttttcatcgtgctgaccgacttcctgtgctgggtgcccatcatcgttatgaagatctgggtttttttcaactacaatatctccgatgacatctacgcctggttggtggtctttgtgctgccacttaactcggcggttaatcctctcttgtacaccttcaccacgcccaagtaccgaaatcaaatcttccttcgcggctggaagaagataacttctagaaagcgagcggaggctggcaatggaaatgtggccaccacaacgacgggcacggcaactggatcctctcagcatccggatgacttcacgatctttgccaaagccgcgatgagatgccattag

SEQ ID NO: 27 - protein, 359 aa, Drosophila
MTPRVRMCKPSTDGVSSFQDLLSKPVLRYSAWVMATLTIAGNVLVLWGRFIYRDENVAVTMVIRNLALADMLMGFYLVTIGVQDYRYRNEYYKVVLDWITSWQCTLIGTLAVSSSEVSMLILAFMSLERFLLIADPFRGHRSIGNRVMWLALICIWITGVGLAVAPVLLWRTSTLPYYGSYSGTCFPLHIHEAFPMGWLYSAFVFLGVNLLLLVMIAMLYTALLISIWRTRSATPLTLLDCEFAVRFFFIVLTDFLCWVPIIVMKIWVFFNYNISDDIYAWLVVFVLPLNSAVNPLLYTFTTPKYRNQIFLRGWKKITSRKRAEAGNGNVATTTTGTATGSSQHPDDFTIFAKAAMRCH

SEQ ID NO: 28 - DNA, 3759 bp, Drosophila
cactcagatttgccgacagcagaaatattttagggttgtatcttagaggtggagaaacatcgatgccaacatcgatgtcatcgatgttttcgaaaaatcaaaaacgtcgatgtttttcgaggaatcgtcgatgttttcagcgcatagaaacagcaaagtgtgtaaattgtaagtctaaattaatttccatattttctaatacaattattaatagcatattgcatatttattgtgactcgccggtggtgtaggctggtgtcttggaagacatggataaatatctgaaatgtaagttttttttttaaagatcaatttatttgttttttgccaaagacatcgaaaacatggatgttcgccaacatcgatgtttctccacttctaatgccaacgaaaacgtgactgggaacgtatcgatgggaaaaacgttacaaaaataccaactatcgcatagcggaatcaccttggcgggctattcgaatgtatctcacaaatagtttttaaggaacctacagtcagtaccaaatacttaaaattccatttatattttattttatgctacagaaaactgataagctgcattacttttgaaaagttaaaaattgtgttttttaaatgatttatttatataaataagcttatgtaatactattgttaatatgtaaaaaaaaaagaataaaagaaaaagaatagtttacctaagcagttgcttgaataatacatacataatttaagttttatacataatttatcaaccctcgctcagtaggaaaaaaagatggctcagaaatgagcaacgaattggaatgtccgataagccttttttatcaaaataataatttttacattcccttttcataacgctttcccagttagtttgtgccaatcgtaaaacagcatccgcaaagtgaagtcgctgctattttgtagtaccactacattcttatttatttaagtaatatttaaagaatgtccagctaactatatgattgctagttcaaaaatgttactttctgcatcgatcctaatatatttcttgctgaatctgcaatcttcgagtgctgagattgccgactgcagtttctatgataccgttgatatctcggaaggccagaggctctcgaatggatcatacctctacgagggattacttattcccgcccatttgacggccaagtatgaattcaagcttctggcgaatggagataaggagcaggtgccaagtcacgtgagaggatgtgtgtgcaagctaaggacttgcgtcaggttttgctgcccacatgaccacataatggatatgggcgaatgctacgccaacatgacgacggaggagaacgaattactggaccccatgctaaatgtgaccctggacgacggatcagtggtgcaaaggcactataagaaggagctcatggtgcagtgggatctgccaaagccctgcgatgatatgttttacctagacaaccgggatataatggatgagtacaccttgttcgaggtatggctgctcgaaaaataagcatttttgggcaggatttatttatgctttggctctctgcagaatggaagattgctgcgccactacgatcaagtgtatttggacaagtcggagtactgtctgcagcaccgaacattcggcgaaggtaacaacaactccattcgcattataccccacaactgcttgatactgccatccagaacgggacagaccgttggtaagatgatgcccattgcttgcatggtagctcccagttctatatctttcctatttccatagtgatgatcacatcgttgatatgcttggttcttaccatcgccgtgtacctgtgcgttaagaagctaatgaatttggagggcaagtgtttcatctgttacatgatgtgcctatttttcggatacctgttcctactccttgatctgtgggagttatcgctcgatttctgtaaagcagcaggttagcttagaggggatgcatttcaacacaacttgacaaaccattgaccatttacgacaggtttcttgggatactttttcgtcatggctgcgttcttttggctatctatcatcagtcggcactattggaaatgtcttaccaatccctgtgcctcgatgaacattcggtcagaacgtgcgtttctgctatacagctgcttcgcctgggcaatgcctttggccttgaccggagtcacctatctggctgataacgttgtgaacaacgaggagtggcagcctcgcgtgggcgacgaagggcattgctggatctatagtgggttctgttttgtatccggcttgtggtaccagctcaccaatgtttttctttccaccctcagctaaaagctggtctgcaatggtgtacttctatggaccgatggtgctcctgattctcttcaacataactatgtttgttctgacggctaaacacataatagattccaagaggactcttcgaaagattgctcgcaatgaaggtagaatacagaagctgaattcggacaaacagaagtatatcaattataatagttgaaaatgtcagtttaagataaatattatcaattcgttacagttacacacaatttctgctgctcttcactgtgatggggatgtcgtggagctttgagatattctcctacttggtgcaacgcgagaaactgtgggtcaatatctttctggtagctgactacttcaactggtcccaaggcgtcattatatttgtgctattcattctgcggcgcaaaactcttgtactattcaagaaacagtaagtcttatagttcatagttcgggtaaccagttccctaaaatgtctcttttcagaatatttcccaaacagagagcctttagtagatctgcaactcaaagtacgattgaatccatttctcaaacaaaaaggcattttaacatgacatagtattttcttctcttcgaattaatcaatttaatagtaaagtataactttttttctcacaaaatgtatgaatatatttcacttcattctacattctatatagaattcatttaatcacaaaatgtatgaatatttttctttatatgacgtgcatcgactatagaaaatcgactatagtgtgccacaatatattttactcatcatttcctaatcaaactattgcaaacttaactttgagccgaggaaaaaccctgtatgtctatcaaaactatgagtcaaaagtatgacgcgatgctgaaagtagttgcctttaaatattgaagtgataaatgtagaaagaagacatttgtatggaaataaactaagtttgtaaatctacattcgctttatttcatgtacaaattttaatttaaaaactttgaaggtaaatagtgctttatcagatgcggattacacggtagcagttatcatcgatgtcgaatcttcttgtttatgtgaccgcttttcttcgctgtcgcactggagttcgtggatagtttgctctttgtattcgaagtgggtgtgccgaggagatccttgttccctccactgttcgtagatccagacaccattccgctcactacgctgccctcattgcgatgcgagggtgaatctgtaaataaaaaggtgtaattaaacatatatacttttctggagaaaagcgctaaagttgaatctcaatgtgctgtgctgccttacccttttcgtctttcggtgtgctcttgattgtcgtggttccgtcgtgggccgttgtggtgttctgattgattgagatctgattgtcgctggagtcttcatttgtgatggaatccgattcg

SEQ ID NO: 29 - DNA, 1449 bp, Drosophila
atgttactttctgcatcgatcctaatatatttcttgctgaatctgcaatcttcgagtgctgagattgccgactgcagtttctatgataccgttgatatctcggaaggccagaggctctcgaatggatcatacctctacgagggattacttattcccgcccatttgacggccaagtatgaattcaagcttctggcgaatggagataaggagcaggtgccaagtcacgtgagaggatgtgtgtgcaagctaaggacttgcgtcaggttttgctgcccacatgaccacataatggatatgggcgaatgctacgccaacatgacgacggaggagaacgaattactggaccccatgctaaatgtgaccctggacgacggatcagtggtgcaaaggcactataagaaggagctcatggtgcagtgggatctgccaaagccctgcgatgatatgttttacctagacaaccgggatataatggatgagtacaccttgttcgagaatggaagattgctgcgccactacgatcaagtgtatttggacaagtcggagtactgtctgcagcaccgaacattcggcgaaggtaacaacaactccattcgcattataccccacaactgcttgatactgccatccagaacgggacagaccgttgtgatgatcacatcgttgatatgcttggttcttaccatcgccgtgtacctgtgcgttaagaagctaatgaatttggagggcaagtgtttcatctgttacatgatgtgcctatttttcggatacctgttcctactccttgatctgtgggagttatcgctcgatttctgtaaagcagcaggtttcttgggatactttttcgtcatggctgcgttcttttggctatctatcatcagtcggcactattggaaatgtcttaccaatccctgtgcctcgatgaacattcggtcagaacgtgcgtttctgctatacagctgcttcgcctgggcaatgcctttggccttgaccggagtcacctatctggctgataacgttgtgaacaacgaggagtggcagcctcgcgtgggcgacgaagggcattgctggatctatactaaaagctggtctgcaatggtgtacttctatggaccgatggtgctcctgattctcttcaacataactatgtttgttctgacggctaaacacataatagattccaagaggactcttcgaaagattgctcgcaatgaaggtagaatacagaagctgaattcggacaaacagaattacacacaatttctgctgctcttcactgtgatggggatgtcgtggagctttgagatattctcctacttggtgcaacgcgagaaactgtgggtcaatatctttctggtagctgactacttcaactggtcccaaggcgtcattatatttgtgctattcattctgcggcgcaaaactcttgtactattcaagaaacagtaa

SEQ ID NO: 30 - protein, 482 aa, Drosophila
MLLSASILIYFLLNLQSSSAEIADCSFYDTVDISEGQRLSNGSYLYEGLLIPAHLTAKYEFKLLANGDKEQVPSHVRGCVCKLRTCVRFCCPHDHIMDMGECYANMTTEENELLDPMLNVTLDDGSVVQRHYKKELMVQWDLPKPCDDMFYLDNRDIMDEYTLFENGRLLRHYDQVYLDKSEYCLQHRTFGEGNNNSIRIIPHNCLILPSRTGQTVVMITSLICLVLTIAVYLCVKKLMNLEGKCFICYMMCLFFGYLFLLLDLWELSLDFCKAAGFLGYFFVMAAFFWLSIISRHYWKCLTNPCASMNIRSERAFLLYSCFAWAMPLALTGVTYLADNVVNNEEWQPRVGDEGHCWIYTKSWSAMVYFYGPMVLLILFNITMFVLTAKHIIDSKRTLRKIARNEGRIQKLNSDKQNYTQFLLLFTVMGMSWSFEIFSYLVQREKLWVNIFLVADYFNWSQGVIIFVLFILRRKTLVLFKKQ

SEQ ID NO: 31 - DNA, 4469 bp, Drosophila
acgttgtcagtgtgtgtgacggttgttaatttcatttgacttgcgagggttttaatattgcaatggaaattcggtacaatttgccgtccattaaataagcacgcaattaattgtggcagccatgacaggcgtggcttgccaccaattaagtggaatactatatggctatatcgctatatcgctatatgtctatatggcatatagatgcccacagccccttggggtcgatcgcctacgccgtctataatccccagctaaacttcgagacatcgcatccggcaccgcaatccgaaatcggaatgctgatgaggcaacagagtggacgcggccggaaacaaggcactcctcccatcaatctgtcagacgggccagtgagtcctggatgtcctggtgaacgcagctcagctcccagcgggtgaggccagttgcccagacagttagtccgccaggcagtcagtcggtctgtcagtgagtcagttagtcagtgagcgagtgagtcagtcagtcaatcgaacaatcaatcatacggaatgacagctacgtcggcttaagtcaaaggcagtcggccaagaagggatcttgtctaacttacagtcgcaaaattcaatagcctgtggcaatcgcacttgcaactttaataattccaagaacgaagcagtcataatgtttactgaaataatgttatgccacaattggcacatacaagctcataatagtgttttattctgtttttaattgcactttaaaattgatgattgtattagccatcataggcatggcttgagctgttcatttagccatttgattttgtctacgttggttttttatcaagtttcttgccgtgtaaccttttttttttttttgggctctcccaacaatttgagctcctttttcgttttcgcattcccttaaacatttgctggggaaacacattgatttatatgccggcatcgccaaaaattgaatgttattgcttgaatggccccaatttacttaaaagctacgctcctccgccccactgcccctctgccgctccactgacccctgaccccattatacatgttgtgggctccactggctcctgattggtatttatgagcgtgtttatttattatatgacccaacacttgataaaattaaacggaaatggttggcaattttgcatttgattctgacacccaaacacacaggcaggcaaattcgcaaatgaactcatctgcccaatattccgaccataaagcatcccgaccaacggcactcacatataagttagttaagtatgtatattagtggcttggcaacttaccagaaagtagacagcaaatggcatcacgaccacggcgaccaggagatcggcgatggccaacgagactataaaataattcgtgaccgtctgcagggagcgctcgcggcacacggacaggatgaccaggatgttgccgaagagggtcaggatggggaacagaatcaggatgagcgcccagtagttgtggtccactgaaacgaagcgagttgtagttacattatatccgggatgcatccatccgcaggctctcctgctgctgccacccaaattccctggccaaagttcaccttgcaggaagatttcagggaaagctcaacgggcacgtaagtcaattacacaggcagtccgtttaatcaaggactctggctgacaactaattttaatggcaacacaagtaaggactagcacacaaagacgtgaatcttaaaggctgttttaatataatctatctaatatagagtgatgcatgttaccaacagctgcgttgttaaaaattaaagttatttcacatattaaaaatggcaaaatatggctatgtaatatgaaagttattaaacttgaaatacctttatcttcattatgaaacaaattaaacaaacaaatatgtaggaacttttcttgagattgcacgaataaatgagttatgtaacgcgtttaaattaaattcttgctatcaaaactgatttctaaatgaacatctttataaataaattaattatcggcggtttcattcaaatactcccatcttagaaatctaaggaattctgttctcaaaacctagtcacctcactatccgatgaaaatatattatactaaagaagttgctgttgcaaggtttaaatgatgctccaacttgatgataatgtttaaaggtatttaatgagattcaaggctatctaatctaatttaataattttaaagcctttgaatgatattcaataatatctaatgagctttaatgatttttaaagatttataatgcggttttaagatgttaagttgtagtagtttgatgatttcgaatggtaatcctgcctcgtactcacccactctcagctcgccgcaggagtcggttaggttgagcgtctcgttggtgcagttcagccggtagccgtcgaggtacagtcccgtcaggttctgctcgaggagcagtccgctgcccctgctccccgtgatggccactcccggcgcaatggtgcttgttcccgaaaccgtgctcccattgtagttgggaaaataatcgttaaagttttcgagcagcagcatgaaggtgctgccccctgatcctccagcgccgcctacacctccgcccgccgtaccggccagtccgccagccacgcccacatccccagagccgcctccatcgtaactggtcgtcgagggcgccgttcgattgcccagcgtctcgcgcgccaccgttgctgtccgctggagcagttccgcatcaccgaagccgcccagcatgccatagtccgtttccgcatcagccacattgtccagggctgcctcctccccgctgtcgatcagcgcgatgccagcatcgccgccgtcgcccgctcctgctgcccctccgcccgccagctgttgttccacaaagctgcgcagcgagtaacgcccccgctcaccatcctccgcactggagttgctctgggctggctgcgtgctgttcagtgcctccagccaggccagggttccgttggcgcccgtcaccgccaagtttgtgctgttctcgggcccgcccactgccgcctcactgcccaccgaacccaagagccattcgctgatgtcgtcgatcagcgcgtagccggcgtcctccgccgccgtttccacatcctcgtagagcggcaagtagccggctggcattgtggggccctcaacgcccgcctgcgcatcgctgccgttcgccggttgagagctgtccgcttccaccgccaggtggtgatttatccacgtggctcccgcggatggggctgccgtggtcgaggtggaagcagcggctgtgctcaaggtcgccgatgtggttgctgccgttgctgcagttgccgcagttgctcccgttgccgccgcagttgttgccgccgtgctgctcagtggctgggctgccatggtgccgccggttccgctgctgctgatgccccgccgccaatcgaatgggctcaacatctagtggggcgggggcgtggcagcggaggcgagctgcaactcctgcaacgccagcggcatgtttccgtttcctgcagcgaaagagacgaagttcggaggtgagaaaacataaatcacaaaaatttccattataatcaaagttcttgaagatagttcttaacgatacgcacaactaagattacaattttaagcctaattggtcgcgttaatgttgcttaatttgataaattcttgtaatccgcaaatgagagtcatggttcttttcgacttaatatttttaggatatctaaaaaacaaagtcgttctcaatttttcctacttacacattacacattgcatgccccttcgtttgcattttcaacacaaggcgtacttcatgcttgaccacgcccccccaaccaacacaacaacataccatccagcaccacgcccccatgccattttggacgtacggaccctttgcccaactgccatggccgcatgtttaattaactctttaatcaatttattgtcaattattctacaaaaagcgacagcgaaaattgtgtaatttaattaaattagcaaaaggtttttgtgtctctctcgccccaccaaccattccgcccactcccacttccattctcgcaaccaaaatgccacgcccccatgctcgacgctgtcttgcttttacacattttgcaattttcgcttttgtatttgccaattggcgctgattaaagccgcccgagtcgatgggccataattaaaagatggcctaatgagaggcgaggcgagtacgtctcgagttggctgggggtcaaaggtaatcggatcggagtggtcttaagtcccctgccttctgcctctgtcttccggagatcgggttattcgaactctgagcttgtggattctggactctgaattctggattccggatcggaggcagagatccgagagctgcacacccagacggctggcactaatccaatttgggcacacttccaggcgacgagaggca

SEQ ID NO: 32 - DNA, 1389 bp, Drosophila
atgttgagcccattcgattggcggcggggcatcagcagcagcggaaccggcggcaccatggcagcccagccactgagcagcacggcggcaacaactgcggcggcaacgggagcaactgcggcaactgcagcaacggcagcaaccacatcggcgaccttgagcacagccgctgcttccacctcgaccacggcagccccatccgcgggagccacgtggataaatcaccacctggcggtggaagcggacagctctcaaccggcgaacggcagcgatgcgcaggcgggcgttgagggccccacaatgccagccggctacttgccgctctacgaggatgtggaaacggcggcggaggacgccggctacgcgctgatcgacgacatcagcgaatggctcttgggttcggtgggcagtgaggcggcagtgggcgggcccgagaacagcacaaacttggcggtgacgggcgccaacggaaccctggcctggctggaggcactgaacagcacgcagccagcccagagcaactccagtgcggaggatggtgagcgggggcgttactcgctgcgcagctttgtggaacaacagctggcgggcggaggggcagcaggagcgggcgacggcggcgatgctggcatcgcgctgatcgacagcggggaggaggcagccctggacaatgtggctgatgcggaaacggactatggcatgctgggcggcttcggtgatgcggaactgctccagcggacagcaacggtggcgcgcgagacgctgggcaatcgaacggcgccctcgacgaccagttacgatggaggcggctctggggatgtgggcgtggctggcggactggccggtacggcgggcggaggtgtaggcggcgctggaggatcagggggcagcaccttcatgctgctgctcgaaaactttaacgattattttcccaactacaatgggagcacggtttcgggaacaagcaccattgcgccgggagtggccatcacggggagcaggggcagcggactgctcctcgagcagaacctgacgggactgtacctcgacggctaccggctgaactgcaccaacgagacgctcaacctaaccgactcctgcggcgagctgagagtggtggaccacaactactgggcgctcatcctgattctgttccccatcctgaccctcttcggcaacatcctggtcatcctgtccgtgtgccgcgagcgctccctgcagacggtcacgaattattttatagtctcgttggccatcgccgatctcctggtcgccgtggtcgtgatgccatttgctgtctactttctggagccagtggagcccacaacatgtataatggggtcaggggtcagtggagcggcagaggggcagtggggcggaggagcgtag

SEQ ID NO: 33 - protein, 462 aa, Drosophila
MLSPFDWRRGISSSGTGGTMAAQPLSSTAATTAAATGATAATAATAATTSATLSTAAASTSTTAAPSAGATWINHHLAVEADSSQPANGSDAQAGVEGPTMPAGYLPLYEDVETAAEDAGYALIDDISEWLLGSVGSEAAVGGPENSTNLAVTGANGTLAWLEALNSTQPAQSNSSAEDGERGRYSLRSFVEQQLAGGGAAGAGDGGDAGIALIDSGEEAALDNVADAETDYGMLGGFGDAELLQRTATVARETLGNRTAPSTTSYDGGGSGDVGVAGGLAGTAGGGVGGAGGSGGSTFMLLLENFNDYFPNYNGSTVSGTSTIAPGVAITGSRGSGLLLEQNLTGLYLDGYRLNCTNETLNLTDSCGELRVVDHNYWALILILFPILTLFGNILVILSVCRERSLQTVTNYFIVSLAIADLLVAVVVMPFAVYFLEPVEPTTCIMGSGVSGAAEGQWGGGA

SEQ ID NO: 34 - DNA, 11501 bp, Drosophila
tttgtaccgcagtcaagcgcaaaaattcctcgaaaaaccatagaccaaggtgtttatgagtttattaatactgtgtaattattatttgtgatatatgtgtgggaaattggtaatagatcaaacatgaaagtaatggtatctgtttttctgtattaaaataacatatctgataatttcctaaaggatgttaatgttaatttaataggtattccaaaactaagagtgaactggcaaaatgtaaaattagttggtatttccttttgaataagcttgacctttaacttacttcatagcctatgacaactcatatattataaatataaataataataaatgagtgctaataataatttttaatcaaaaattctcacaagctaaccttgtaatgatggtacgcctaactgatacccattatgttaccatggccaggcataaattcctgttactggcaccgcatcatcatcatactggcattcggtcatattaaaataatatcacctatctatagggctgcggctcttttgacacgcacacgtgctgctcagcagaccaagtgaacttatcaatgaacacccgccacacccacacggtggcccaagcacctgacccacccatgcccagtggccagcaccacccgaactcgcagaagccaatgaatggccggcagaccaagaaacacccactaacatctcgggagattcttcgtctgccgagttcaagaacaacacacaagtggccgtaatgaaatgtgaatagccttggcaaacatgagtccggaaagccaacttatgatggcttctgaatagccaaccgcatagtacacggctaagagcggggaccaaaaaaggacctgctctttgctcgctcgttggctttctctttcgcagcctcggctcggaaaaaggatgccgacaagcaacaattttcattgataaaaacaccagctgctgggtcctgaaactcagtcgtacgcgagtcctcagtcagtcagtttcgagctctgggatgcaacggatgcggatgccttaaatccccgagccgtttggcggtgttattgaaaattgcgtattcgccgcgtattaccaagtaatagcttgtccaaagccactacgctgtcaaaggacgggcttaaaacgctacttgcatttttacgtactatacatagataaattttccgggtaatcggcggaaattgagttaaagttttgtgtccggttggcgccagttggcaattggtgctggccaactttcggacccgaacgatgacaaactgaaaagtaaactttgtaaagactcagcaccttacaaacaaattcaagtgtttcgcgaaaaaaaataaaaaattttgaattgaagaggacacagttcggtgaaaaaaaaatatttgcaatgcacaatggaaaatcagcaaagtgacctccaagtttacgaaaacagaaactaactcaataaccatccctgcaggtgagcagaggcaacattttttctttaaaacattttttaccatatttccgtaaacggtttgcgtcctttggcaaatttatggttgtcttggaataaaatgaactttatttacttggcaacaaaacgagtgtttattcttgtcgcatagggaatcaagcagccaacataaggactatattttgtttaattcgatttaatgtgagttgcagaattaaatttctttttaattcaacacgcatctgtacaccatttgtaaaattacaagctaaagctcagcaaacactaaattttaatcagtgaaacgaactgtattctgtcaattttaatatcaaaagcatatacattgctcttaaaaatattaaactgcgttagtaacgtaaacagaaaatgctatgaaatttgttataatcaaaattcacttgaaagagatttcaacaaaattaccaatctcgtgttctaaggaattaatataataattataataatatcatagcttgttccctgtcacctaatatataccatttaaataaaagtaatgcctaggtaattgtttgtgagcgataagcgcagatttgtctgcataattatgtgttaatttgattgaggtctactgaagagggccttatttttataagccaaaagaacaaattcaaacaaaacacttgagggcggccttagctggcaataagcggcttttgcctaatggaaaataagtggaatgcctaggaattattggccaagtggacgggctgctctctttctggcaatcctgagtcctttcgactgattcgtttttggctcctttggccccatctccgcacgctttgttcggcttgacacacctgagtggcgatgttccacacaggcactttcccaaacaaatggaacccggcatctcgcatttggttgcccgaacgtaagtcccatgaagtggtcttctccagtggacagccagtcagccgcatttcttgggggcgctcttctcgagcgcttggcctctgagatggcctctttggatgtcttggagatatgcagctcatcctggccacccacttcgccgagccattccatttcatttccctggccaacatacccgtatgaaacgatgagtgctcttcacagtttttgcctacattccggccactgcaccgactgatggttgatggagacccattctccggttagtgttcgtcttggtcgtcttggtctgggtctcggtcctggtcacaatgggaattcgcagcttaaaggcgccgtggctttattcaggccagattggatacttgacatgttctaatgcggcgcagatctcagtttctgcaacgtgctctccctatctcagttacatgaattagcattcatcgccactgcactgagcaaaaaataggaccacaaatcgctctaactgctgtaaattgatatccattcaattattttatttaagtattataacacattgatagaacattaacatgtcatatatttttgaacacaattcagcattacactttaataaagtcgaatttgaatttatccaactgacgcgttgggtgatatcataaattcaatttcgagaatgacaggtcattaaaatgttgtcacctacactgtcaaatatttaagtcaaaatattaagttataaaatatcaaaaagctttgatagctttagagtatgatttacgtttaaaaggattgtacacgaatacaattttgtttttttaagcaatcagcggcgtgtttctgttttgccatcataaatcgcagagtttcataatccctctaaattaaaatgtcctttgggatttttctgaaatttttttcaaacgcttccccctttttgtttcctgcatgtttaggccgttaagagcctgttgatgatggcggcatggtagaactttctgttttgtcacagccttgggctgctggctttacatttggtggaaaaacgagaccagccgagcacgtgcggtccgcggggttggggggggttgtggaagctaaggacgtggcaggacgaaagcgctgagtgcagatgaggactgcaataaactgccatacataagtgaaaattgtgaaatgaaaacttgcgcgagcataaatcaatacacccaaggggggtcatgggctcccatggcaggcaacaaaaaaatatatatgtatatatatcagctgggaaatgtgctccctactcaggtttagcgacttgtatttcatgttcccaaatcagctggtgttatcctttgattgccgggcacacgacaaaagtggtggaccaggacacatgtgatgattgcttgcgtgggtcgcaggaatgagccaactcagattggtaatattgtgtatgaacgtgatttcgtgactttgcaatgtttctatttaacaaaaactcttgttaaagaaatacacacaaaacatcacttataaccctttttggatatctatgaggatttaaggtttgtaaactaaggcaatggtataccttaaaaagtctatagtaaatcgcatatattacatcaattttaacgttcatgctgatcttccagttccaaaatatatattttgaaatagcttacatttaattaagtgcacttgctataaaagttttgagcttgcctgaagtttattacataaaaaattcgcagaaaggcggctaaagaatgaaactaatttaagcccaaatgataaactatttgccaagcatgtttcgtttgaattatgctcccgttgctctgcctaccaaaaatggcaaaaactcgcaatatgattattgtggcagcttcttccggtgaattaaaaatacaaaaaaccagctcaaattgaaacttaattttaataaattgttttcatgctctttttcgctgccgttgtagcgttttcccgcccatttcacccgagtggctggataattgtatccgcgcaatcatcccgcggcttccattgccgcaggataaaaaccaaactgcaacgaacagaacagaactgagcactttaagccatttccactcgtaattaaattttgagagcggatgaaattgtggcggctaaataaaaggaacaaaatgcatctgtgcatacagcaaaaaaaaaacagcaaaaataaataacaaaatgcagaagagcaaaaaatcgcgcatatccgctttgtaaaaatacgagtctaagtgatgggttccgtttttgtttagtagtgctcactagtgaacggccttgtcgcatttggggctgatagtggatgtagtgtggggtgtattgtggtgtgcatgggggtgtttgaatcgcagaagtcggcccagcccgttggccgtcaagaggacctggcctaatcgaatgaatgtagaatgggcacaaacaagtcacgcctgcctgcgcatttcatcaaagaacggcgaacaagaggctaacagctcttcgtttctctctctctttctctgctcagctgggtcctttgaagatcctgaatgacactcaattggcctaatcggtttctgaaaagcatagtatgaatttcatacggtacgctaatttcgaatataacaaaaagcaaaaacgcttttgatatctaaattgtatttgccattgaaaagtttatacctatatgtataatatggaacctttctaaatatagtaattgatacgaaattgcaaaaatgatggatgaacatctcaacattcaacaggttgcccagttacttaatcaatccatcggtgttgaaagtgagcactttatacaaaaatactcatgagtggttctaaagcggataagaggatttatcttgagctcaaaaactgatgcagtgatgcaatattcaagatgtgtgccttagtattcaacatttttgccagatttatcgaaacgtaaataaataaaaatatacatgaaatttaataacattgcgcagctttttggtgaaagcagttttaatttaataaagcaatcgttgcgttgaaactaatattattttaaattatacaggatacaaaaaataatatacatatacatttaaattttgaatttaaaaaggggtgtgacagatttactgaataataataactttaaacatgccacctaacaaaagcgaaaacaattgtttaattacatttgtgcaacttgtggcatttagtaaaagcgaatatctaagcaaataagtcgtgtaatttgatatgcaatatagcaaccaaacaaaaatgcgtgttattaaaatcatgattactgccatacgtatagatgtttcatgtcctgtcccttgttgatttcatgctgataaaggacatacacttttaaatcttgctaacttggtacttttaacgagcattcgaaggtatcctgtgcccatttcaaaaaagctgtaagctctttggcagccaaaaaagctgacaaatttgtgccggaaaggaaacaacttcctatttgcatgatttattgccaatggaataacaggttggcttcagttgcgtatgtccctgctattcgattttcaacgaaatttcggttggcattcagtcggaatgaaagtgaaaacaaaaagtgctactactacccttttgtgaaagcccccggagaaaagacaactttcaattggccaattagtgctatttaaatggcaagttacgccgttttcaaagggccaactattttgtttttgaagttccgcgagttgtaaatgtaataagcaaatttcgcagttctccataggacacctttacactgagttcctttccagttgctcaagttttgctccttggcagctgcacttgttgttcctgtttgccagaaagttagtttctggccaagaatttgtctttggccaagtactgctcacgctcggtttctttgggcaaaagttggtatttgagtttcgcagtggaaaagcacttgcggcagatcttcaaattctgccaaacccggcgggctcacgtggccgccttctagttatttaataagtaattaagttccctaattaaatacattctcgcagagatttacataataagtaatctacgccgaacgtcttcctccattgcggcgttaattaaatttgcagaccgattgcatttcggaaacttgatttggtttgcgtctggctgccagtcgttaacaaatcatgattgctgaaatggtcaactttgggcatcgcacttcgtatacacttgagattaaaaattctttaataaggggaaataacacttatttatagaagtatttttaaaatatatacaattaatctagtcagcgcttttgacgtaatttatattgagttcgaacaactcatttgacaacatcaaagaatccaatattcagcaattttaaacatactcacatgcgaagggggaatcgaatttccaataatttaaaaaggaatcggaattttacattttctcgcgcttttgcggagaagccgtgatatggtgactgtatttatgaaatttgcttttacgccacttccatgaactgaaaattggttttcactgcctgtttttggtcgatataataatgctgagatatatatatgatatgtaatgtctttctatatattgtagcatttacgaagggttatagcttgatataaaaaaagaaagaaactttgaacaaactcaagtatataaaaaggtttcaataaaatatataaagtccattagctgtagcttacaggagcataagttttcttgtttaagacgaagctttatcgaactttatcttatagatacatatatctattactaggataagtaagtaattacaattatttatgcacgctgcattgacatatgccaaacacttaaagtattcccacccagccgcacttgctacatttatcagcaattgaattaatttcaggttgcggttcagctgagtttggtttgtaaaatacattataatgtttaataatcagcagagagcaggaaaaatatgtattaagttcggcattgtgttaaactttaagcgaatagttaacacagtgttattggttacccgctgcttttaataactttccctttcgatgcccacacaacctgagttattttccttaatggtctgaaaaaatgaagaaaaaaaagtttggctcaagtttattggtttcgcgctgctttcatcaattgctgcacgcaaatgcttctcaaaaaaaaaaaaaaaaaaactaactcttcatttatggcatttcttagttgcgaataaattccgatttaagctggttgaaaaaaacccatcctttcaacggtgactaaacatattttaagcagaccgctcaaactcaaaccgtgggtggttaattaaataagagcatcgattaagtcaactgtctttttatctgtcccacttttagggtcacccggtggacagctaattgcagctaaccccattggcatttagcaaacggaaaatgcatcgtgaccgctgcaaccacattgcaccactaccaccagcagcatcagcgccaccacttccacctccagcagcagcaagggaatccgcaccgctgaaactgaatctgaaggcatcccagtggcggcgacacacggaatccttgccaaatgcggccaaatgcgaggcgctggcaagtaaataagcgtaatcctttgcgggcacgtaccaccactactacctcctgttcggagtagctcgtaaatatttggccaagtcagtcatggaggccatcatcatgacgaccctgcccaacctgacaacggatgcaggtgacagcagcttctggctaaccggtgccctctcgctctccgagatgttggccaactcgagccacagccattccactgggagcacaacctcgacggctgggagttcggccaccgaatcatccgctgtgaatgtaggcaaggaccacgacaagcacgtgaatgacagcgtttccacgggtctgaggtaagtgcatgtgcctaggcttttccatttccatggcaacacacacacagattccattaagctcatgactgcgggctcaacaagtcatcgcgataagctcagcttcattttccaggagatgcattcaactaatgtgcttagaattctactattgtacataactaacatatagggaatataatcagattacttagaacctcagaacagtcaatacaatccacttaatataaatgaattaaaagtatctatcgaaactgaaaagaagaggatcattagcttgggtacaacatttataagaattttggcttatgaagttgcaaaaagaattcttaaaaaattcaatacaatgtcaaatagttctgaaaccataaattattaacaattaaatattaaattatttatattgatttaattcatacatttaaacataagttacactactgcaaggaggaaagtatcagatgacttgagctatactttcataaacttagcttagagcaatctaaaccaaattgaaaactcattgaaacccattttaattgaataaattgaaacatttacttttcccatttccccagcaattacagtaattaccccagctacattcactacagggacaagtacgacctgagctacattgccaaggtgaatcccttttggctacagttcgagccacctaagtcgagcaccttcctgattatggccgccctgtattgcctgatttcggtggtgggatgtgtgggcaatgcgttcgtcatctttatgtttgccaaccgcaaatctctgcggactcctgccaatatcctggtgatgaatctggccatctgcgactttctgatgctcatcaaatgcccgattgccatttacaataacatcaaagagggtccagctttaggagacattggtaagcttaaaacttggggaaataacttactaaatatctatataaatgaaattcattcggcttgcatttatgtcaaaaatcgatcaacaaaagcaatctacataataaataaaattaaattggcccaaaatgcttggactgatttcagctgtttcttgcagaaattcatttgtgggattctcttttcccgaaagcaattaatagaatttaaatgaaacaataaaagttcaatttgtagcctacacatcttggttcatgaaaaacatattccaaaatgtaatggctattaaaatttcaccgagccttttgtttgccttgaaacgggtggttcattaaaaatcctactgactttccgtcccacagcctgtcgcctctatggatttgtgggtggcctaagtggcacctgtgccatcggtaccctcaccgccatcgctttggatcggtacaatgtggtggtgcatccactgcaaccgctgagacgctgctcccgcctgcgatcctacctgatcatcctgctgatctggtgctacagcttcctgttcgctgtgatgccggccctggatatcggactatctgtctatgtgccagagggcttcctcaccacctgcagcttcgattatctgaacaaggagatgccagctcgcattttcatggcactgttctttgtggctgcctactgcattccactgacctccattgtgtactcctacttctatatactgaaggtggtcttcacagcgagtcgaatacaatcgaacaaggataaggccaagacggagcagaagttggccttcattgtggcggctatcattggtttgtggttcctggcctggtcaccgtacgccatcgttgccatgatgggtgtcttcggcctggagaggcacataacgccactgggatcgatgatacccgcgctcttctgcaagacagctgcctgcgtggatccctacttgtatgcggccacccatccgcggtttcgtgtcgaggtgcgaatgctcttctacggacgcggagtgctgcgaagggtctccacgaccagatcatcgtacatgacccgatcacgatcgtcgttcacccaccgattgaggacgagcaccaccggtgagggcggaatgggtgatcaccgcatggaaaactatctgatgaacaacaatctgatgatggtgcccgaggagacggaggagaacgaggagatcgttgtggtggccgagatcaacaattcgattagcagcgtcatggaacagagtaagttctgaaggctgacgattatgccagttaagagaacggaaattctgtcaatctgtttcgaaccaactaacataaacatttttaatcagttttaagttttacagacgtgttttatataatttgaaaattagtcaaacctatgatcacgatgatactgaaaactttgcttggaatatctgaaactcgcctgtttaatttccactttttccaattgaaaatttcaatttgatttttgcccaggtaatttataaaaaaacctttcctatctcgaaaagtaaactgttcgctgttaattgaaaatgtttgtgcactgcactgcaaggcatatcaaaatggaagctatcaataatcgtaaattgaatggatcggactcaagtttcattgttgaactaatctaatctaatttgtatgtagaaataatagaccgaactgaaatcagcaatggcagcaaagtaatttcgctcggcaatgatatatgccaatggcattgttcatctgagtgaatgcgttgtcattgatggacctacaattgaaatgaaaataataataataataaatagaaatgaagcagggaaatccgccgagcagtgggaaattggcaaaggcacaacgacgacacagtggtgatagtaaacatatttaatgagcttatgtgatgtttagacagggggagtaggcgatcagagcagggaatggattagttagcctatatacatatatatatacacaggcatatgtacatatgtataagacatcggaatagcaggccaattagagaggcagggccgaaattagtacaaagaaagagggtggcgtgggtaggggccgaagtggaaattcaatagtcagattatacatcatttcagggaaagtcactcggacccaaggtcaagccgtggtattggatgttaacaagcggatgtgcagattgtttgcattgtagtttaatattggaataactcacaatcaaagcagcctgcggacatcttgtatttctgaaatggagtc

SEQ ID NO: 35 - DNA, 2177 bp, Drosophila
ctgggatgcaacggatgcggatgccttaaatccccgagccgtttggcggtgttattgaaaattgcgtattcgccgcgtattaccaagtaatagcttgtccaaagccactacgctgtcaaaggacgggcttaaaacgctacttgcatttttacgtactatacatagataaattttccgggtaatcggcggaaattgagttaaagttttgtgtccggttggcgccagttggcaattggtgctggccaactttcggacccgaacgatgacaaactgaaaagtaaactttgtaaagactcagcaccttacaaacaaattcaagtgtttcgcgaaaaaaaataaaaaattttgaattgaagaggacacagttcggtgaaaaaaaaatatttgcaatgcacaatggaaaatcagcaaagtgacctccaagtttacgaaaacagaaactaactcaataaccatccctgcagggtcacccggtggacagctaattgcagctaaccccattggcatttagcaaacggaaaatgcatcgtgaccgctgcaaccacattgcaccactaccaccagcagcatcagcgccaccacttccacctccagcagcagcaagggaatccgcaccgctgaaactgaatctgaaggcatcccagtggcggcgacacacggaatccttgccaaatgcggccaaatgcgaggcgctggcaactcgtaaatatttggccaagtcagtcatggaggccatcatcatgacgaccctgcccaacctgacaacggatgcaggtgacagcagcttctggctaaccggtgccctctcgctctccgagatgttggccaactcgagccacagccattccactgggagcacaacctcgacggctgggagttcggccaccgaatcatccgctgtgaatgtaggcaaggaccacgacaagcacgtgaatgacagcgtttccacgggtctgagcaattacagtaattaccccagctacattcactacagggacaagtacgacctgagctacattgccaaggtgaatcccttttggctacagttcgagccacctaagtcgagcaccttcctgattatggccgccctgtattgcctgatttcggtggtgggatgtgtgggcaatgcgttcgtcatctttatgtttgccaaccgcaaatctctgcggactcctgccaatatcctggtgatgaatctggccatctgcgactttctgatgctcatcaaatgcccgattgccatttacaataacatcaaagagggtccagctttaggagacattgcctgtcgcctctatggatttgtgggtggcctaagtggcacctgtgccatcggtaccctcaccgccatcgctttggatcggtacaatgtggtggtgcatccactgcaaccgctgagacgctgctcccgcctgcgatcctacctgatcatcctgctgatctggtgctacagcttcctgttcgctgtgatgccggccctggatatcggactatctgtctatgtgccagagggcttcctcaccacctgcagcttcgattatctgaacaaggagatgccagctcgcattttcatggcactgttctttgtggctgcctactgcattccactgacctccattgtgtactcctacttctatatactgaaggtggtcttcacagcgagtcgaatacaatcgaacaaggataaggccaagacggagcagaagttggccttcattgtggcggctatcattggtttgtggttcctggcctggtcaccgtacgccatcgttgccatgatgggtgtcttcggcctggagaggcacataacgccactgggatcgatgatacccgcgctcttctgcaagacagctgcctgcgtggatccctacttgtatgcggccacccatccgcggtttcgtgtcgaggtgcgaatgctcttctacggacgcggagtgctgcgaagggtctccacgaccagatcatcgtacatgacccgatcacgatcgtcgttcacccaccgattgaggacgagcaccaccggtgagggcggaatgggtgatcaccgcatggaaaactatctgatgaacaacaatctgatgatggtgcccgaggagacggaggagaacgaggagatcgttgtggtggccgagatcaacaattcgattagcagcgtcatggaacagagtaagttctga

SEQ ID NO: 36 - protein, 551 aa, Drosophila
MHRDRCNHIAPLPPAASAPPLPPPAAARESAPLKLNLKASQWRRHTESLPNAAKCEALATRKYLAKSVMEAIIMTTLPNLTTDAGDSSFWLTGALSLSEMLANSSHSHSTGSTTSTAGSSATESSAVNVGKDHDKHVNDSVSTGLSNYSNYPSYIHYRDKYDLSYIAKVNPFWLQFEPPKSSTFLIMAALYCLISVVGCVGNAFVIFMFANRKSLRTPANILVMNLAICDFLMLIKCPIAIYNNIKEGPALGDIACRLYGFVGGLSGTCAIGTLTAIALDRYNVVVHPLQPLRRCSRLRSYLIILLIWCYSFLFAVMPALDIGLSVYVPEGFLTTCSFDYLNKEMPARIFMALFFVAAYCIPLTSIVYSYFYILKVVFTASRIQSNKDKAKTEQKLAFIVAAIIGLWFLAWSPYAIVAMMGVFGLERHITPLGSMIPALFCKTAACVDPYLYAATHPRFRVEVRMLFYGRGVLRRVSTTRSSYMTRSRSSFTHRLRTSTTGEGGMGDHRMENYLMNNNLMMVPEETEENEEIVVVAEINNSISSVMEQSKF

SEQ ID NO: 37 - DNA, 6472 bp, Drosophila
tatgcgcaactcgacaaacatcttcctaaccaacctgagcattgcggacctgctggtgctgctcgtctgcacgcccaccgtcctcgtggaggtcaacactcgcccggagacctgggtacttggccacgagatgtgtgagtggcttcagctccagtgctcctggtctatttgttctccccaacctaattaactgctgttctatcccaggcaaggctgtgccgttcgtggagctcacggtggcccacgccagtgtgctgaccatcttggccatctcgttcgagcgctattacgcaatctgcgagccattaaaggccggctacgtctgcaccaaggggcgggccatcctcatctgcgtcctggcctggggcattgctgcgctctttacgaggtaagcgattaggctcgtacttgattttcttaaatttatttgtaaactagcattatactttaaatatcttaattagtttggtcgcttttcatcgcatgctttttggtgtttgtagtcctacatttcgtatgtacatatggtattatcctgtttagatctacttcgtttgtggcctatatccgtttattcatttcgcccagtcaagcattaagttcctcgctcattaattataagtgtcaatcgccgtcattttaatgatttgtgttttgttattgggttttgcacatttttccccgttttgtttattttccattatgacgtggaatttctggtcttggtgtttggccttttgtgcgccatctacgctggcggcgtgtccatttgtccatttacatgctaaactgcgactgtcgcctatctattccatttccactcctgtcctaccacttctcctgcttcactcgcttcatcgttgccattgccatttccattcccaatcccattcccattgacatccgtcgcctcaagttgcggacggcttttgtccaagttccggaagcttgccgttatcagcgccctgtcatctttaataagcaccgatgtccgctatcatggatttcatttcattgacactttattatggtgcgctccgtccaaggacgagcggcgaccctttttaattttgcaaatcttgccgcgtccataacaatgaaataaacagcacattgtcgagctggccaccgacccctcagcactccgggagtcatggggtcatctatggttggcagctgggtccgcaggacacccgcctacgggccgagacccattaattacgccacacaagaagcccgaggccaaaaaaaaaaaaaaaaaaacgggcaaacatttttaaacacattcaaacagacgcgccacacgacgcccatgggcgcaaaaggaggcgtgtcaaatagctgacgcacgtaccaaaacgcccggatcatctttagtgggaaaaaaaacacggccatcgcctgttgactgtcatggcatttcgttttcgaggtctagccagggaggatttgggctggggctgtgtttaatcagcggctcggataactcaaaataatcaaatatttaaacttgtctgtttgctggatatatttacaaagtcaacagagtatatcccaccataagttcgccatctactcacttatccccttgtaagtgaaatgtaatcacatcaatgaaatttggaatattttgagctttagttaaatgtattttaagatgtatcgatataactcatacagatacttttttaaaatgagtggtttcatttttattaaatttctgttattataataattttaaatgcaatgttgatattatatttcaaattggcttaacgcctacagattagaatacactaaagatacacggtatacattttttttctagacagaaatatactttaattcaactaaattaatatatatatgtacctctcccatcttttagctattaaatagtcgaggaactcgactatagtattatatccggttttggtttaaaaaccaatcattgtttttttttaacgacacagtactatttaatatgggcttcaacatatattttaaatgatgaacccaagaaatgaaaaaaccataaaaacaagcggtcatgaaaatcgcgtcctggccagactggtacattggaaacttgaacttcatcccagactgggttaaccttttgcccatcgccattctctcatcatcacaaacagcttctcttcctgcctgctgaaacctcttctttttcccgccactcttggccttttcctccaaaatccaaccgtatccattatccattatccacgcccccggtaaccccgccacctgattacgtttcttgtttgctttctctccccaatctgcaatatcccccgagcagccccattctgtgggtggccgagtacaagctggccgagtacattgatggatcgtcggtggccgtgtgcctgacccaggccatcagcgactggacgctggccttcttcctgatgaccatctcggtgttcttcgtggtgccgttcgtgaccctggtggtgctgtacggcatcatcgcccggaatctggtctccaacagggcggccatgctgcgcgcccgtcccacgaagccggagcttagtctgaaggcccgcaagcaggtggtcctaatgctcggcgccgttgtgctgtccttcttcgtctgcctgctgcccttccgcgtcctcaccctgtggatcatcctcagcacggaccaaacactgcacgatctgggattggtgcgctactacagcttgctgtacttctgtaggatcatgttgtacctcaactcggccatgaatccgattctttacaacctgatgtcgaccaagtttcgaaggggtttcaagcggctttgtcaggacgcagggcgattactgctggaattggtgacattgggaagaaggaaggaagactcttctcgcgggcgcagaggtaccttgtcactgggcatgggcaccaatacgaacacgaataccaactcctcaaatgccacaggagccacgagctccagcattctctcgagaagctccaatcgcaggtgcagcgaggatatcagtcgcacccgccttaagatcgagatgcagatgccatgtggcagcgacctggaggccatggccatgctgcagcattccaccttgggcaagggaattgccaggcgagtgagtgatagccgtctcatgcctctgagaaatcatcaaccacgacgccacaagccgcaaataagtttcgacgaggagtcactggaggagaataagcgtagtgaagcgaaaatcccaacaaaatgtcgagaaaagcttcctggaatagcaagagaaatagtaaatctgaccgaaaataccctctaagcgagatgggcgtgaaaaatcgcctttaacccgtttacacactcgcttcacttggctggaatgtgccgatgacgctgatcccgatcccgattcctattcccgctcctggtaaacacaaatcgcttcctgaacgcttttggcagccataatcgatttcagtcacccgctgacagctgccgagaatcccgaatcgtagttgggctgccgccttggacatttccgtaccaaaaacaatcaatttttcgggctattaaactcgaatgaatgtgccaaagataaataacagcaacgacagccgaacagcactaaaactaccactactggtcagggttaggagtccagatatcgactggcagtaaggggtaagccattaggtggccttcgaggagcggagctggcaaatggaaatggcttaatatgcgtttgggcgaaccatcaggtcggcggataaacatgatttaggtgtattgaaatagtttccgtacgccggaccgtacaaaatggccgccattacacgggcggccatcaccggaagtcgaaaaaactgttgcctacttgccggcagctcaaataaaaagcttagctcaatatgcacacaatgtccacatgtaaacacagctgtacatacacatacatacccccacacgcacacatagccaaatattaatatttatatttgtacgaacatatttatatacacatatttacatatatatagtctgcttataaatatgtacaaggaaccacacgcacacactcacacacacacgagagtttgtaagtaaataaattttttatgacaactcatggcgggacttttccacattaccccatccaatcggaatctgtaatttatataattctaaggaaatcggacaaatgttcgtcctctgtaaatatacgtattcgtaccatgcgcgtagctttttaatttgttttcgtagccctatgacgtagactcccacttttgtagagtaaaaagtaataagtagcttgaacccacaccatcctgcgagtatgatgagtatgagcagacgctgccgtttccgtttccgctgtgtgattaagttgagtgcttcgcccccgaaacttttccagtagttagccgttgagtagcttttaaatatttgtttgtttcctgcccgcagcgcgataaaactttgcagacagcgctagtcactctagtccccgctaaaactgataatatgattcttgcagtcccatcatcgccatatccacctacagcgtggaaccctacggggacggaaccgatgctcccgtttgcaccaccgccgccgatggtttctggtcgatcttctacttcgtgggctgcatcacggtgtttttcttcctgcccttcggcatcctggttcttctatacgcggccatcgcttacaagctgctccgtcccaacaacgccttccaccgaccaacctccccgcagccacagcagccgtccggcggagccaccagtggctcctcacaggtgcccagcaccaagggtaacagccatcaacaaagcaacgggatgaggaagcatcgcaagcaggtaatcttcatgctggtggccgtggtgtctagcttttttgtttgccttctacccttccgggccttcaccctctgggtgatcctggccagcgccgaggatgtcgagggtctgggcattgccggctactacaacctgctgtacttctcgcgcttcatgctctacctaaactcagccatgaacccgatcctctacaacctgatgtcctccaaatttcgcagcggcttctggcggctgctgctcacttgtctgggccaacggccacatcaccaccatcgccaccactaccatcagaggcagcatccaacggcaggcggaagtgggcgcaatgcgtccacgcgacaggaacaggatgccgaggaaggagctgcgctggcgggaacgaccagcgcccgacatccacgtcgcacactccgccgcgaggccaccttcttgatcaactccatatccacctcctcgggtacggatcgcaccacatcatcatcggcgtggcgcagcaacagtctgtccatttccggtctgagcgaacgggagcgcggcatactgggagccgctatcatcggcacaacggctgccaccgttacaaccgcctgtctgcaggagcgacgcgccagcaagatctgaatcccatcctaaatatgcatccttcgagtccctgtccactgccagcaaccgttaaagtatttagttgaattccaacagcaaatagtcatagttttagaaaaattttgttgtaaagactgaagtacctcagaagaagtcaataaacgcaagagaagatgtttttgaaaatcgaaactaattttcttcgggcttcgaaaaattgaagtttgcaagattcgaaatagctttaacttgatttttagaacagaaacgagtatgaacttttcatacgatcatttttatcgcacctattgtgatttaatgggagataggaggagaccaattgggatatgcaaaaataacgcaactattattatctttgtatgtacgattaattttaatctctaaagagtcaaagtacttcaataattttacaaatctgtcggagggaatgtaagcttgcccaaatcaaatggaagctacaatcgttgtcagatggagatattttatgttagaaggaatatctcggatacgaaatatttaatttaaaattccttttcatattattctttttaaaaaataataagtcctgtatgtatacaatgcaatacataaaggtagagtatgtcctaaaaagaaaaatatctttccgaatatatgtatataatttataaaataagtggatacatacatttttcgtaagtatcctagaagatttgccaacgtatcaggtttacaaaaattgattacctatgtgcagttaacttaacggcagtgcactaactaatctgatttgtgaaataatgcagatataaaacatttttaaatagaaatatatttatacatctgattcttcaacatctaagcactcgtatagagtgctttgaatatattctaaatacattggcatgatccaagttttaaatcagccaaaaacttgctccaaaaacaggaagattctacacaaatcgcctcgcccttaaagtttctgccaagtatttgggtgcgtgcggatcagttc

SEQ ID NO: 38 - DNA, 2196 bp, Drosophila
atgcgcaactcgacaaacatcttcctaaccaacctgagcattgcggacctgctggtgctgctcgtctgcacgcccaccgtcctcgtggaggtcaacactcgcccggagacctgggtacttggccacgagatgtgcaaggctgtgccgttcgtggagctcacggtggcccacgccagtgtgctgaccatcttggccatctcgttcgagcgctattacgcaatctgcgagccattaaaggccggctacgtctgcaccaaggggcgggccatcctcatctgcgtcctggcctggggcattgctgcgctctttacgagccccattctgtgggtggccgagtacaagctggccgagtacattgatggatcgtcggtggccgtgtgcctgacccaggccatcagcgactggacgctggccttcttcctgatgaccatctcggtgttcttcgtggtgccgttcgtgaccctggtggtgctgtacggcatcatcgcccggaatctggtctccaacagggcggccatgctgcgcgcccgtcccacgaagccggagcttagtctgaaggcccgcaagcaggtggtcctaatgctcggcgccgttgtgctgtccttcttcgtctgcctgctgcccttccgcgtcctcaccctgtggatcatcctcagcacggaccaaacactgcacgatctgggattggtgcgctactacagcttgctgtacttctgtaggatcatgttgtacctcaactcggccatgaatccgattctttacaacctgatgtcgaccaagtttcgaaggggtttcaagcggctttgtcaggacgcagggcgattactgctggaattggtgacattgggaagaaggaaggaagactcttctcgcgggcgcagaggtaccttgtcactgggcatgggcaccaatacgaacacgaataccaactcctcaaatgccacaggagccacgagctccagcattctctcgagaagctccaatcgcaggtgcagcgaggatatcagtcgcacccgccttaagatcgagatgcagatgccatgtggcagcgacctggaggccatggccatgctgcagcattccaccttgggcaagggaattgccaggcgagtgagtgatagccgtctcatgcctctgagaaatcatcaaccacgacgccacaagccgcaaataagtttcgacgaggagtcactggaggagaataagcgtaggttaggagtccagatatcgactggcagtaagggtcccatcatcgccatatccacctacagcgtggaaccctacggggacggaaccgatgctcccgtttgcaccaccgccgccgatggtttctggtcgatcttctacttcgtgggctgcatcacggtgtttttcttcctgcccttcggcatcctggttcttctatacgcggccatcgcttacaagctgctccgtcccaacaacgccttccaccgaccaacctccccgcagccacagcagccgtccggcggagccaccagtggctcctcacaggtgcccagcaccaagggtaacagccatcaacaaagcaacgggatgaggaagcatcgcaagcaggtaatcttcatgctggtggccgtggtgtctagcttttttgtttgccttctacccttccgggccttcaccctctgggtgatcctggccagcgccgaggatgtcgagggtctgggcattgccggctactacaacctgctgtacttctcgcgcttcatgctctacctaaactcagccatgaacccgatcctctacaacctgatgtcctccaaatttcgcagcggcttctggcggctgctgctcacttgtctgggccaacggccacatcaccaccatcgccaccactaccatcagaggcagcatccaacggcaggcggaagtgggcgcaatgcgtccacgcgacaggaacaggatgccgaggaaggagctgcgctggcgggaacgaccagcgcccgacatccacgtcgcacactccgccgcgaggccaccttcttgatcaactccatatccacctcctcgggtacggatcgcaccacatcatcatcggcgtggcgcagcaacagtctgtccatttccggtctgagcgaacgggagcgcggcatactgggagccgctatcatcggcacaacggctgccaccgttacaaccgcctgtctgcaggagcgacgcgccagcaagatctga

SEQ ID NO: 39 - protein, 731 aa, Drosophila
MRNSTNIFLTNLSIADLLVLLVCTPTVLVEVNTRPETWVLGHEMCKAVPFVELTVAHASVLTILAISFERYYAICEPLKAGYVCTKGRAILICVLAWGIAALFTSPILWVAEYKLAEYIDGSSVAVCLTQAISDWTLAFFLMTISVFFVVPFVTLVVLYGIIARNLVSNRAAMLRARPTKPELSLKARKQVVLMLGAVVLSFFVCLLPFRVLTLWIILSTDQTLHDLGLVRYYSLLYFCRIMLYLNSAMNPILYNLMSTKFRRGFKRLCQDAGRLLLELVTLGRRKEDSSRGRRGTLSLGMGTNTNTNTNSSNATGATSSSILSRSSNRRCSEDISRTRLKIEMQMPCGSDLEAMAMLQHSTLGKGIARRVSDSRLMPLRNHQPRRHKPQISFDEESLEENKRRLGVQISTGSKGPIIAISTYSVEPYGDGTDAPVCTTAADGFWSIFYFVGCITVFFFLPFGILVLLYAAIAYKLLRPNNAFHRPTSPQPQQPSGGATSGSSQVPSTKGNSHQQSNGMRKHRKQVIFMLVAVVSSFFVCLLPFRAFTLWVILASAEDVEGLGIAGYYNLLYFSRFMLYLNSAMNPILYNLMSSKFRSGFWRLLLTCLGQRPHHHHRHHYHQRQHPTAGGSGRNASTRQEQDAEEGAALAGTTSARHPRRTLRREATFLINSISTSSGTDRTTSSSAWRSNSLSISGLSERERGILGAAIIGTTAATVTTACLQERRASKI

SEQ ID NO: 40 - DNA, 3821 bp, Drosophila
cagaaagtgtagggaatgtagggaaatgcaaagcgagaccctttggctgctcactgactgaaatatcaccagactcggctcggttctgccgctcaagtggcagtaaataaaagttgtgaggagccttggcggcatgagtaataatgaccgaaatcagagcaccatcaccatcaccaaccatcgctaccaccgcccaacgcgttgctcattttattaaaataacaaaaatattttgccgctcgcagcctttttacgatgccgaaccgactggcggcccatttgttatttggcggtcattgccaccaaatggtgtcctgtcgctctttctcgtcctcgtcctcgtccttgtccgttccactgggccaactcgtgtgtcgtgtgtgttttgaccagagttatgcagctgcggatgggcaaaaatgttttattgccagctggggaatgccaaagtggcaagaggcagattgcccgatcttagctgtttaaataaatttaagagagagagagagagagagagatctggcacgaagcactccatcactggtccagcgatccgttaagccatcgagggtccttcgaatgaaatgccagcgctgacaaggcaaacactggagatttgtataataaggggtgggtggttgtgccgaaatttggcactgataggcaggacacttgtcaggcttggcgcaaacaaaactgacatttatattgatgtgtccctgtacccaattagatgcccatcattatgagagcaggctatctctgctctcgtgtccttcccccttctattttgcgcccgggaagtcatatatcgaacattaggctctgtttgtgtgcagagcaatttggcgggaagtggcagcaggaggacgcacatgatattagtaataatgtaattatatggtcataaacaaaataataaatcaataaacaacacacacgcacacgcaggcggcacacgagtaaaagttatcacgggggggaaaaaaatgaaggaaaaatgggaggcagagcagaggaagtgaagaaaagggaaccggaaaggaaagccattcatttggccccgcgactcaagtgccgttgtctacgtttgcgaatgtgtgtggttgtgtgcgtggcaggacttcctgttgccacatggacggaaacggcgccataattatgccataaacccaaccataaaggacatttttatagatgtgcccgagttaatccctttgttgttccactcgctaccgcacccatctctcatgtcctttttatccgcacatcctttcagcttactccaccgccgccctgctggccatcgtgttcgccattcccttcggtatccgcatgctggtccacaaggatcgaggacagtgggaggagttcggcccagccttctacaccgcccacctggagctttatctgggcaacggctgtttgggtgagtctaggattttggatttgcaacaggaggagctttcaagggtcgaagctcttctaaaaggttcaaaagttggactcagctttaagttcactcggatatactaaaaatatatataaaacaacacgttatgaaactgtttatgtaccataaatggagcgtaatgtgcttgatttaaaggaacagatgtcaacagtgcttaaattgtaataaaaagctatttgttttaggagctagccagacattattagtatggactgataagcatatgttagaagataatatttcatacatttagatacgcctataatttcataataataaatcataaaatttattccgttgggatcatttaatccttgaacagatatctgttatttgataatatttacaaggaatattatcccatttgcactcctaggcgttggcgtaatgatgttactagtgctgaccattgaacgttacgtgtccgtttgccatccaggatttgctcgaccagtgatgggaccacctgggtaagtcgcattgaaagtctgtagatggtctatttaattgatccaacctagcgttgtggtattcctcacctgcttggccacggtaatcgtctatctaccgagcatctttcgtggcgaactgatcaaatgcatccttggatcgagtgacgtatatgtatatttgcgacgcgacaacactatctaccagcagaccatcttctatcgcgtctacaagatcatgctggaggtgatctttaaactggtgcccactttggtgatcggtggcctcaacatgcgcatcatgatggtctacaggcggacctgcgagcgccgccgcaagatggtgctcagtcgtccgcatgcccagggacatggtcacggacatgggcacggacatggtcatggacatggacatgcacatggacacggctatttgaaggacgacgatccgcgaaagttcgccgaggagcggcgcttgttcctgctgctcggcagcacatcgattttgttcctggtctgcgtctcgccgatggccattctccacatgacgatcgcctcggaggtctatccgagcttccccttccaggtgttccgtgccagcgccaatctgctggagttgattaactactcgctgaccttctacatctactgcctgttcagcgaggatttccgcaacaccctggtgaggacgatcaagtggccctggttgaagggcaagttctgccaccaggccgagcacgaggtgagtgccagtccaccggccacagccggaaccgtagcggtagccggaaccggaaatggccacgtttctatttttcatccggcaataccggcgctgactctcacacccgcagaacccgacgaacggccccggtgtgccaatggcgtgcttcactaaggtggacaggggccatcaaaagcaccacataactaccacctcgggcctgggacgatcgagtagcatttagacaatgcctaccacccaacaacaacaccaccacaacccatccgctactcgagatccgaactccgaacaccgagaaccctcccagcccagagtaaccccaccaccaccacccaactccaaaaccgtcatcaccacttccacttaccccccaggtcgtcgaggttaaagggtgccctttctctcgcttgagatcctgcgacatttgaacgtgttcaagtatcgatgaacgaaaaatgatatacgataaacaactaacgattaacgataattgatattcagcgccacgcattgcgtatataagtgtctgtgtgtgttccttaaacatatatatttaaatatatggataaacatttttttttttttagcactagaattaggtacttaaaaaccaaacttaatcgaaaacacatccgtaattggtgaaataattgatatcgataggtaaaaccagttcgactttcgatcagcatttgcgccgaatgatttcaccacaatgtagcttgcggaatgtgtatgtcgcaggatcaagatcctcaagccacacgtatagatgcagatatgatagttttatcaatggatagattgcttgccgtattgataaccaaagagctcgtttactctagcattagatgcagacagaaacaggaacagcgacaggacaacgacagacagacatattgacatatagacaggtatagacaggtgagatggaacaatagcgagagagagagagaaagagttttacgatgataatatgcagacatacaatacttatatatacacttgcatatgcctatatgtgaatgatatttatgtaaacgacgtatttatgtatacacgcgtaactttaagcgaatatatttatatatgcatatatgtatctattgattatagcatttaagtgcgcgcaagaggaatccggattccaacc

SEQ ID NO: 41 - DNA, 1158 bp, Drosophila
atgggaggcagagcagaggaagtgaagaaaagggaaccggaaaggaaagccattcatttggccccgcgactcaagtgccgttgtctaccttactccaccgccgccctgctggccatcgtgttcgccattcccttcggtatccgcatgctggtccacaaggatcgaggacagtgggaggagttcggcccagccttctacaccgcccacctggagctttatctgggcaacggctgtttgggcgttggcgtaatgatgttactagtgctgaccattgaacgttacgtgtccgtttgccatccaggatttgctcgaccagtgatgggaccacctggcgttgtggtattcctcacctgcttggccacggtaatcgtctatctaccgagcatctttcgtggcgaactgatcaaatgcatccttggatcgagtgacgtatatgtatatttgcgacgcgacaacactatctaccagcagaccatcttctatcgcgtctacaagatcatgctggaggtgatctttaaactggtgcccactttggtgatcggtggcctcaacatgcgcatcatgatggtctacaggcggacctgcgagcgccgccgcaagatggtgctcagtcgtccgcatgcccagggacatggtcacggacatgggcacggacatggtcatggacatggacatgcacatggacacggctatttgaaggacgacgatccgcgaaagttcgccgaggagcggcgcttgttcctgctgctcggcagcacatcgattttgttcctggtctgcgtctcgccgatggccattctccacatgacgatcgcctcggaggtctatccgagcttccccttccaggtgttccgtgccagcgccaatctgctggagttgattaactactcgctgaccttctacatctactgcctgttcagcgaggatttccgcaacaccctggtgaggacgatcaagtggccctggttgaagggcaagttctgccaccaggccgagcacgaggtgagtgccagtccaccggccacagccggaaccgtagcggtagccggaaccggaaatggccacgtttctatttttcatccggcaataccggcgctgactctcacacccgcagaacccgacgaacggccccggtgtgccaatggcgtgcttcactaa

SEQ ID NO: 42 - protein, 385 aa, Drosophila
MGGRAEEVKKREPERKAIHLAPRLKCRCLPYSTAALLAIVFAIPFGIRMLVHKDRGQWEEFGPAFYTAHLELYLGNGCLGVGVMMLLVLTIERYVSVCHPGFARPVMGPPGVVVFLTCLATVIVYLPSIFRGELIKCILGSSDVYVYLRRDNTIYQQTIFYRVYKIMLEVIFKLVPTLVIGGLNMRIMMVYRRTCERRRKMVLSRPHAQGHGHGHGHGHGHGHGHAHGHGYLKDDDPRKFAEERRLFLLLGSTSILFLVCVSPMAILHMTIASEVYPSFPFQVFRASANLLELINYSLTFYIYCLFSEDFRNTLVRTIKWPWLKGKFCHQAEHEVSASPPATAGTVAVAGTGNGHVSIFHPAIPALTLTPAEPDERPRCANGVLH

SEQ ID NO: 43 - DNA, 14111 bp, Drosophila
aataatccaccttcgaaggtaaaccatcttaattatgctttaaaattgctggattatataaacccctaaggtagttcatcccacttgttcaactgaaatcgacccacacaaatggtggttggtatctatctaccagagttaggagctcgtttaacccaatattgcctattcgtagagatccgcattcctgcgaggagaagtcgaactgccgtagctgagctgcgagtcggtcttcttcagaatggaaacgtggtgggtgggtgcatcacccgtccggttggccatcagcgagtcctgtttgtggagcaggccgcgtcgctggtcggcgaaggagatgaccgagtcctgcttcaccagttgatggcgcctttgctctggtcgctggtccacaaacgagatcaccgagtcctgctttacgaacttctgccgcttatcgagcagagagctcggtgtggcgccctgtcgccggcccacatccatggaaacgctatccctgtccaccagtgtgtcgttgagaccgtgtcctgccgacctgcgtgcctccatgtaggacacaattgagtcctgcttggacagggagaccttggagccattgctgtcctgctggcagaggggtcgccggatcccagaagcatcactgcaggagctctcctgcttgatgaggaactgacgcgatccgtgagagtcctgcttaagcagcatctgctgcgacaggttgctgtcctgcttgagcatcatgttgtggcgccgcagcgagttgtgctcgtagatgtaggacaccgcgttgcccttgctgctcggactcttcctcgagctgttctggtggtagtgcgatgacttccgggtgctggtggtgctggaggcgatggccacgttgtcgtagtacctaggtggttaaggtggaaaaagggtttttatcgaagggaacacgatttcttacaaatcttcatatcaattttgaaggccttcacatattttatcaatatatttgaggttagaaattaactaacctgaggcgtccgcagcagctgcgcgacttgatgatggccgcgaatccgcgtcggtacttcttgttcactgagtagagtatggggttgatgcagctgttcgaggagcccagccactgggccaccggcatcaccttcttgaggatctcgaactcctcctgcgagatgtccgagccgaatttgatccgcgcaaagatgacatagagcggcagccaggacaaaacaaacaggatgaccacggccaccaacatcttgatgaccttcaccttgctcttctgctgcatgcggtccatttgcgcgtccttggactcgccggggatggacctcgtggagaccttgatccagatgagcacgtagcagagcgtgatcagggacatgggcagcaggtagcaggccaccaggttggctagcaggaagtagaggttcccatccgtgcccgggggccacacctcctggcagaggaactgcggctgcgagtaggccgagaccagggcgtcggagaagacctcctcggcgggcaccaggtcgaagaagagcagccaaggaatggtggtcaccagcgcgattacccatatgccgattatcatgatgcgggcacgtcgctttgtcatctgcttcaggggccaccagatggcaatgaacctgcaagaggggagtcccaacaaaggggatttttaccaagtagtcaaagaaggagtcttcgtaggagcagcagcagcagcaggagctccggcttcagatgccactgacggctttgagccgtcaaggataatggcaatcatcaagctgtcgagtcgagtcgaggcgacgatgacgatgacgacaccgtttcaactaggaggagcagctcggcatgcaaatatctccgctgattaattcgcacacgcaggatgccgatgccagcagccatccttaagcctttttctgctgagtgttcgctttccaatctcgactattgaacccgcctgctactcctgctcctgctcctccgccccaaaaaagcggcgctgcggatcctgtcattttttattctgcttgccataatgaattgtaatttgaataagagctgcgaggtagtgagacgagtcggtatggggccaacaacgagttcagcatttttcatttagcttagtgcagccggctcattgtggcgcccgctcagtggtcatagacaagacttgtcccggacgaacgaaactggttgtctgctcctggcccgaaaccatgtaattacgtgcattgtgttcgtattttcgacttggaccttgggttgtcgcctgcgtctgtccgccaaaacatttggcagataacacagcggtaattccattagagggcggccatgccaggccactaccccagaatcctattcctcaccgactaaaaatagccagcttaacaatgtggccgagaccctcatctctgcgaaaaaaaaaaggtgggccgcctgggcgaccaaacaaagctgtccgcaaagccaataatcaaattgtcataacgtttatttataggagcaaaccaattgcatttgcataatttgcccatgcgacttctatggtcataaatcaggcgagagcttaattgagttctttttgggtaaaaacagcggagtcggaaaaagtaatcagcagttttcgctggtgcagactaattcaaactaaacctctaatttgatgttgaaattttgttaaatcgtattaactacacttttgatgatgtaaaccattttatgagctttaaaaactaaaatttctcttatgagttctcttatacgatttatgtatgatttgtttcacaaataaactctccttatagattcaattgctgtcggaaaattaaattattaatattattttggtaatcacgggtaattgttgcccatcaattccgttgagtaccatatgcgtaaatctctaaggacgtcagttcagtattgttagcatatttattaagaaaaatcttgccacaatcaacttaaacaaagtagttaatactcgcgcttttaaagcatttaataagccgcaagtgtattaatttaatatttgccacacaatcctgtgtttctgtctagatccacgtggttttatggctcctatttcgcttcctactgcggttacccatacgcactgttgacatttgcgacgcaaagaagacacaaaagccgcaatgccagcaccgtaaagacacaactatgtctataagcgagtgtgctttcttatagactttatgattataagcaatctagttatatacatatacgtattcagacaagaaaagaccctaattaaatgacagtggcataagtataaatataagtagaagtagaagtataagcaagtgataagctaagtcgaaggggcattacgggctctaagaccgtggagagatttaagtttcatgttacagataataaatcttaaatttcgattcagtttacgatggctcgtaaaaggagagaataacagcaaaacaactggataaacggacatcaatgacgctggactcggacttcgactgggacttggaagtggaagtggaattggaagtggatgaggatgtggatgtggatttggactcggttgggttggcgttaagcgtgggcggaggctgacatgcgggcctgtgggtgaccaaacgatcaagtgaggcgctatgcctttgtcccgctggctgaaaaatgacagtggcaaaaacagaagcttctggccaaaactcctcctctgattgtggccagaaattgatataaatgaaagtgcacataaagcgacgggcgtcttattgtccttgcggctatggctagcacaatttgagggacttcagcatcacttgataaatctgttgaccgcgacatttgccgaatttattgcttttttatactttatgggccaggaaacgcagggctgacacatcgattcctggcggccaatcatcaatggtatcaatattcgcggtatcgcggccaacaacattctaaggcaattgaaatgcacataaaatgagaaacatgaaattgattgtaagcagcgcctaatacggacaaggtgagccatagaagcatatgatgatcttgatcttgagacgactgctccactgactctcctacataactgcctaactggctaactgccttactgaccagttttccccgcagctgattgcattgagtggcgctcactttcggttcggtcgcctggtgcaaatccactataaaagccgcactcggagctcaagttgtcaccagttgacaatttgaaatcattagcctagctacctttcctacttcagttatcccgccaaaatccaacgcctcaaaatgttcaaagtagtgagtatcattgtgcagaagaagttgtaaccagtttgaatccaagcatcgtatcattatgatattatatcagtttgctctatagcatttaaaaataaatgcaataaattaagtttatattacaactcatatgagtcacctagtttgttgttaggattggtcttatcttactcagaatgagtaatatatgctttaaagtctgcgacaactaaccaaattcactgtggagtggcagccacctgctgctccgtctaatgccactaatcaggctaattcgtgaactctgatccgccgcagctgttcgtgctcgccgccttcgtcgcctctcaggctatcgcccatcccggcgtggtggccgtggcacccgtggtggcgcacccggcggtggtccacacgcccatcatccatcatggagcccactcggtgcactcgtaaggccattcatgtccaatctgcttatcaccaccgaacaactcacccctttcattttcagccatgttgttcatcatccggcagccgtcaaggtcatcacacccgtcgtccacaagcccgtggtggcggtgcatgctgtcaggccggtggttccattggttccagtgcatcatgccgcccccgccgtcgtcgtgcatcattaagtgcagcgaatacggttcactttcaatacctttcccgctcccgatcccgttcccgatccccaccagacccagaccaatcccttcctgagcaccataaccacgatcccacaataaaagttcatagccacgtaattggagcgagtgttttcaacttacctgtccagggaaacggcaatcaggctgtagaccgaggctgccacggagacaccttgtatgtagggcacaaacttgcacatcagccatccgagcatccaggctgcgagttccagcagttcgcgaaacatgaaagggggaaaagtgcgggaggtgagtaaatattggtcataaacaacgcacaaattatgctgagtaactttcggtcacattgtccttgctggtgtcctagccatacactgaaggaaatgtgagggcctatggcaacaaaaaaagaagaagatgcagatttttctaaaataccccaaggacactttgctcgaaaactttataaatatcctaaccacgaaaatcaaagcaaattaatgtggttaaccgaccgaaggatgcttattgttctcatgggaaatattcgaaatagtagatggtgtatcactttaaatacaaaccgtaagtcatcttgactgcttagctaagaaaagagtgaaaatattataaaactaataattctccgctaagtattataatatatttcatatcttacttttattcttgaataagtacagttttacagctggggatcattgagttctttatagctttactgcttttccccgagtgcactggtagtggttatgctcatggttgtggtgatggtggtggtggtgatagtggtagtcatggacagttgggttcgagatctggttagcgttcaatgcttcttgtcattgccgccgcccacgttcccgtcgttgtttgctgactgagatttatgtgctgcatatcattcataatttggtgacaagtctcagattgcgcccagccatcgtagtgggtggggcagaatgtggagtcctggggggcagagcattgtttgcccagacccagactcaaagccgcggtggaccgcaggactgcctaacttaatttgtattccttttactccattttgtggctggatgatgatggtaaatggaatacacgggccctacttgcgcatagttgagcgttatgaattttatgctaagaggcataactcacccagacacaaaaggttataaagcatacatacatgggcgtgcaatgggaggggcaacttcccagggttgatgacagtcgggcggagaaaggcgcccggttcatgacatatcgaatggcaattaaacaagtgcaagtgcggcccacacatcattagcagttagctgtttggcagtttggcaatttgcagaaggagtttaccgagttcaatgctcgaccaggagacgcctcctgcgtcatggggctcctaatttcctgtctcgttcgcctgtcttatctctatttgttgtcgctttttattatgcagacgcaccgtaagccgccaaggcagcccaataaaagctaactttaatatgatttggcacataaaaatataaatattattggcgctgtggcgcttcgtgcaagtgaactctgtggctgtggacaggttttggttctggacaggatcatgtgtgtctgctgggaggacatacacatcctcccgcctggcaaacaatcaacagtgtgtacacaggacagcagaccgaattggtttttcggttttattcctccgatttgaaatggctttcgggcagacctgcaagtgcaacagactggatccgaggctattaatgcgagtgtatttggccactcacttgatattatgctgataagggtgaactttgatatatagctgtctgcgggagctcttgactcggcaaactttatgctttcaagttgtttgaaaacaatttaaattcaaattcggttccgaaatgcttcatcacttgcgggacaccggattagcagtgccactgggtgaacttttttttttttttaaatacatgttcttccaacttcccttcggcaaataaactatctaattgtgtatgcaattctattaggacaggcaaacgtgactcggttggtttgtctgggattaaagtttgcatcagtgcactttggcagtcaagtgtcttaaccaagtttacattgtggttagcttagcgcagtcaagtgaccacttgataatcccgaacaaacaatggttttcagttcatatggaaagtattttgacaggctgaggcattcagcacggttcaacttattaaattgtccaactcgctgatttggatatttaatataaaaatggaaaaaccacattttacagaaccaacgagaaaagctgacatttaaaattggtttttgttaacataaaacgattgagaaggaataatacataattaatgaaccgcaaaaaccgcattatatataaaaaaaatcaaataggtcaagggttatgccagtagttatttatagataccacaagcttaggtaagacatgattatttcaaggaacaccgagtcattcgaaaccaatctttaattaaccccaaccttaaggccacattaatgtgttgtacaaacataattgtagctaccgaaataacctaattgccttgcgtgacggggctaacccgaacctccttgtggcattacccatttgaggactcaagtgaaaccaaacactccacagtttgctcggccaacatccagcctccccgtcaaggtgagaatgggatgggtgtttgatccgacttggagtgcgtttgacatggcaacatatggcaaacagacgcctccatttatacgcgaaagctggtgctcaatattgatcaactagaggagataataccaatcgatactcaggcttatcgccagccttcgattgtgggtggtgggtggtgggcttgtgcgccccatcagcccttaagaaaatgtcaagtgcgccctaagccttttattttttagcctcttaccctccttacaacgagagcctttgtttttcggtttcggtatatatgacttttagaaatgtgattcaactgaaaatatttaccttatttgataatttgcctgcagaattaaatttaacgcggttatttatgaataatgtccccttatttggaaacaaatttttctcaaggacaactttaaaacgcgttatcttttacagcaacaataaacattttctctactgtgctttatgaggctttaatagcgccaacaaagttttgttacatttttatccccaataccgtgggtgattgttcctatgtaggcaaagtggattggattattccgggcattgcggattcgtttcggtggcggcattgtcatgcacggagtttgatcgtaaagttaatgaaataatcaggcgtgacaaatccgcaggtttggacttgggagtgggaacgggcgtggattgcagtggagtggagtggagtggagtggccatggaaaaggcataacataacacttctggcaaatgcgttattgttatgattatcgccgcggcgtcacgtcctgcggcgacttctgtggcagctcttcgggaaaattgaataccacagctagttcgcagagaaatgcgcctgggacgcggagtgggaataggaattggaatctgggaatcggtggtcctcgatgtgagatacgggattgcgggagtaaagaagctgcagatcttaggtggagggctcagaggttggatgccatttgccgacggcacgtagagactaaattaaaatacaattggcgagctgaaaaatgacttcatcagggatagggaaacagaaatgcgggagagtctgcctccaagttacgcatacgccgcgttcgcccggcacaaatcacgtggccccctaatgaacaaactggcaacgtgactgaaagatttagccaacgggagatgctgatctaaaaagggccgtaatgataacgattccccattgataaaatagcacaacaatggccataaagcgccatctgagacaattgccgttgctgttgcaaggatatccttcgtctcaaggcggcatcgttgctgggaaatcaattcatttcgcattttattggatttcaaagcacacacataaataagggccagcgccacattccgaccaacaaccaccacccaccacccaccacccacaggccaccagccaggaaccacccacaaagagtacacggcccaacccaatacaggtgctcccacaccccacgcatacacacacacacacaccctcaaccacacacactggcacactcgcaagtgtgtgtgtgcataaccctgactattaggtttgccaagcgaaatatttaggtcaattcatccagccgcaaagagccttgaatgcaaacaaccttccattgcaattctgaggcttgaaggtgtgcttagataatggcgctgccagcggcgatggccgtgggcgtcgctgccagctgcgactgcggcggcgacgtcgtctttgacggctggaatttgatttcatataattcattttggtggcaaaacaacccgcccactttgccactcgctgggggcgagtagtgggaactatcagacagcgatgtgaaatgctcgatgtacaaatatgctaaacttccgaactcccacgcactgtgctacacagggagaaaaggttttgttagaggagagcaaaggattaagtggtatgactttacactgctaatttgattatgaagaatattcgtaagagttatagcatttcatcacctgacgaagttcaaaaacatttaagtttaaagccaaaaagtgtatatttctgaaaacgtgtggattgtttaatgaaaatgacgtgttaaacttttgtttgtaaataatacgctacacatgtgtttagttggcaacacatgttttttcccctgcattagtgctatttcaccgttgccgctgtgaaaccgttgccttcgttttaacttcagcaggttgtcgaaagtgaataggaatgtaagtggggttgagagttgtggggatgaagaggtgaagctgaaatgagccaccccaaaagccccaatgccagcgggagggctgcaatttgttgtgactggcgtttttgctaggcatcggcggctcagctgaagctaagacatgccaagcgaaaattgcggagtgggcggccaaaagggtgccccatccaaacaaccatacaaccatctagcccacccaatctaccatccaccgccagccacccaccacccccagtgacccagtaagagctgtcggccctgcgcccagcttgaatttgtgaaattaggtcagttttgtgtcgatgatcctttgggccaccccgaaaagcagccaccaatgcacctacacatgcacagtagcgagcaaacacatgggcgtgagagcgggcgagagagagagagcggagagagtgcgcagtgacacggacacaaaaacggagacacggacaccgatacagatacacaatgcaggcggaggtaaactcattcacttttcgccactcgcttcattcgtttccagcgattcgcactcggcagccttcgtttactacatttcccccacagtgggcttctctgggggagtgtattggtatggggtgggatcgagtgcagtgccgagtctaagagtagagctgcattggaaaataaatctgataagtcaactgcatctgcatatttgttaccagtttgtaatattaatattcaggttaataaataatctgaggggaagaggaactaaaactatttttattattattattattaatttaatttaatttaatattattattattaattattttaaataattttaattattttcatatacttgtggcaaagaaatgtagtaacacaatttgttaaactatttcctattaatcgaacatattgttttacgagtatgttgacaactcttattttgccagcgtactcgctgtatagcaacaagaaaaggagagttctcacagggctgagccacttaattggcaacacttggcacaacctgcgagcctacgacctggcattgggatttgggactagggacctggcactgggattggggtagccatcgaaggcaaattgcagtgaaggatggagcttgcatggcgtgctccacaatcggaatttgatttaccaaggatttcgatcatttttccatgtcagcggcgatttgcatagacatttgccaacctgctcaccttgtcgtccaggtctgcgactatcaatttggatgtcagtccacaaagttcgtttcgaatgcaagcggggaagttgcggaggggaaaccaaccaattgggggtgtaagacggcagacagggacagatagatagatagatagatggacggatggataggcatgtcagggaaatttatttaaattaaagcatacaattatgcgtagcctcgtttatcgggtcgtttgtgggtcgtctctgggatttggtggaattggcctctaattaaatggacacttgttctttggtccatgcggattgtcgtttccaagaaggtaagggctcccatggagagagcacaaattaatttaattgagtgcgaacatccgttgctacggaaatctgacacatttctggtaaagtacgctgaatgaattcttctttttttctttgctgcgtactgtgtgagatgtagttccttgatttaatgaataactggcttttgtcttggcagtctattttaaaagttatcttgaccattgcagaaagctattaaattttgatactaaagcttggcattttccagaacaactttaatgatgctgcatcgttatgttcttcttgtgtatgtagtaaaaattcggaagaagccagggagtctggtatataaaatgcagcttacaaataaacggaaacacagtatgtctgtcaaaagtaaatataaccgagtatgaataaaatcccataatttattattttccaccagaaatatgagcactttcgtttggacatttatgccgacattatgtctaatgagggtcaattacacttgcccaaacatatcgggcacattacgcatacgcagcgtaagcacgcaggagcaacaactttcgtcagtgccatttggcagggctttatctaaagcggcgattaattgcagtacataaatcgggctaatatgcagaacaaacaaaaaaaaacttcggcttccccctagcagctaacgtggcccccagtggcgaataaatctcgtcggcatcttgcggaattaaagagatacttacgcacaaagatgttgccaatcagtgtggctggcaggcagaagacaatgaccaggatgtccgcaatggccttttcgttggagaggggggaatgtaaattttatttcaaattaatggggttcatccacgagatttacggggtccacccaccagattcacaatgaagtagttcgtcaccgtccgcatgcgaggagcccgcaggacgacggcgatcacgaagctattcccgatgagtcccaccaggaagacgacgatgtaggccacgcagtagaccatggacatggccagcgagtgacggtagagtgggtcgaatccgaagtccacgctcccgtccagctgctcccaccggagggcactgtcgttgtacgacttggtggccgcagccgccgagatcaagctggtggtcgccggcgataggttcagcaagttggaatagtaggtggatgaagtggcgtctgcgatggccagcgacttgcccgccagggatcctctcgcagatgctgttgtggtggccgccaaggtggctagcagcgaactggccgccggagccaccgtggccgtggccgtagtgagaaccgtgcccagcagagtgtccgtaatggcgctgttattcagtttaatggcactcgatgagcccaaggagctgacagcagtcccaccgctaccactagtgccattcaattcgttgaaactcaagaggttctgcaaatcgacgaaattatgcgtgaaattattgtaatccccggcgagggcggcggcttcctccattgtctccgcgaccattttccccggcgccatggtcggaatgggcatgggtacactagtcgtcgtactgggaacgtcgccacttgtatggcttttatgctttcgcttgcgaatccgcccgctggctgccatcatcaaatcatccggcgtcttgattgggcggatggcactttcactggcgcctcgctttcgctatcactatctgtagacgtatctcgaatcttgaatctggtatctcgcttgttttagaaaaggtctataaaaatggcatcgtcacttggcatttcgttggcttgtgtaggatatgcaggaagtttcgtggctttgggttagagaacagtttttaattaacacccatgtccatacaatatctcgtttatccggggattgttttgcgtttgccccgaagttgcacaataaatgcagttttctagaaactcgcttctagcgcccaaggacccttccgttttcgttttttttttttttgattgaaatcacctacaaaagtttgttgccgtttcggctgcgaatccgagtgcggaatgcaatgcattgcctgggtcgttcgtcagctggttgacgttgccttggctggcattacgaaaaagtcggcggcccaaggcctcgtgtgcatatttcagataaggccagatgctgggtgcctggataaatgcagctagaggggattggggatcgggcattgggcattgggcattgggcattgggcatcggacatcgggcaaaggagccgagagcatcggctcagggacatggtcaccgccacagttgcaacacatgcgcgtcgctaattaattttaatgcccgttctgccattgtttggctgttgtttttggcacaattgaaaagccagcgagcgtgcactttgacctcaaaaaatcgacaccaaacatcgaacaaacgagcaattgagcaactcaatagcagcgcataaaaattccattaagcacaactgccaagcgcacgcagcactcttcgattgagtgccaaaaaattgccagtaagcattgaaacaattggtaacaaacgaagccagtgcgacattcttttgtgcggttccatgggagtgtccacatcagacaaactggcgactaagggcccctcggcacacaattca

SEQ ID NO: 44 - DNA, 1525 bp, Drosophila
atgatggcagccagcgggcggattcgcaagcgaaagcataaaagccatacaagtggcgacgttcccagtacgacgactagtgtacccatgcccattccgaccatggcgccggggaaaatggtcgcggagacaatggaggaagccgccgccctcgccggggattacaataatttcacgcataatttcgtcgatttgcagaacctcttgagtttcaacgaattgaatggcactagtggtagcggtgggactgctgtcagctccttgggctcatcgagtgccattaaactgaataacagcgccattacggacactctgctgggcacggttctcactacggccacggccacggtggctccggcggccagttcgctgctagccaccttggcggccaccacaacagcatctgcgagaggatccctggcgggcaagtcgctggccatcgcagacgccacttcatccacctactattccaacttgctgaacctatcgccggcgaccaccagcttgatctcggcggctgcggccaccaagtcgtacaacgacagtgccctccggtgggagcagctggacgggagcgtggacttcggattcgacccactctaccgtcactcgctggccatgtccatggtctactgcgtggcctacatcgtcgtcttcctggtgggactcatcgggaatagcttcgtgatcgccgtcgtcctgcgggctcctcgcatgcggacggtgacgaactacttcattgtgaatctggccattgcggacatcctggtcattgtcttctgcctgccagccacactgattggcaacatctttgtgcgtaagtatctctttaattccgcaagatgccgacgagatttattcgccactgggggccacgttcattgccatctggtggcccctgaagcagatgacaaagcgacgtgcccgcatcatgataatcggcatatgggtaatcgcgctggtgaccaccattccttggctgctcttcttcgacctggtgcccgccgaggaggtcttctccgacgccctggtctcggcctactcgcagccgcagttcctctgccaggaggtgtggcccccgggcacggatgggaacctctacttcctgctagccaacctggtggcctgctacctgctgcccatgtccctgatcacgctctgctacgtgctcatctggatcaaggtctccacgaggtccatccccggcgagtccaaggacgcgcaaatggaccgcatgcagcagaagagcaaggtgaaggtcatcaagatgttggtggccgtggtcatcctgtttgttttgtcctggctgccgctctatgtcatctttgcgcggatcaaattcggctcggacatctcgcaggaggagttcgagatcctcaagaaggtgatgccggtggcccagtggctgggctcctcgaacagctgcatcaaccccatactctactcagtgaacaagaagtaccgacgcggattcgcggccatcatcaagtcgcgcagctgctgcggacgcctcaggttagttaat

SEQ ID NO: 45 - protein, 507 aa, Drosophila
MMAASGRIRKRKHKSHTSGDVPSTTTSVPMPIPTMAPGKMVAETMEEAAALAGDYNNFTHNFVDLQNLLSFNELNGTSGSGGTAVSSLGSSSAIKLNNSAITDTLLGTVLTTATATVAPAASSLLATLAATTTASARGSLAGKSLAIADATSSTYYSNLLNLSPATTSLISAAAATKSYNDSALRWEQLDGSVDFGFDPLYRHSLAMSMVYCVAYIVVFLVGLIGNSFVIAVVLRAPRMRTVTNYFIVNLAIADILVIVFCLPATLIGNIFVRKYLFNSARCRRDLFATGGHVHCHLVAPEADDKATCPHHDNRHMGNRAGDHHSLAALLRPGARRGGLLRRPGLGLLAAAVPLPGGVAPGHGWEPLLPASQPGGLLPAAHVPDHALLRAHLDQGLHEVHPRRVQGRANGPHAAEEQGEGHQDVGGRGHPVCFVLAAALCHLCADQIRLGHLAGGVRDPQEGDAGGPVAGLLEQLHQPHTLLSEQEVPTRIRGHHQVAQLLRTPQVS

SEQ ID NO: 46 - DNA, 3688 bp, Drosophila
tgtttgcagagcccacagcaaccaatatgttttcattgtctgcccggtttgtcgctcaatttatttgtgatgttgactttccaacagtgacgtcagtggaggccacagacaataccacatcatcgcaacaattataaatggtgtggtggcgaaaaaacgtccttgtgcccattgttcagtggggcgaactgaaaagtggattttccagcgcgtgccaggaaaatgaatgaaaatgcgggacattcttgaagtcgttgcctttattctgctttcacacataattatgaaataaatattagcttaaaccaaattgactacaacgttatgctctattaactcttatggtctacttatgcttaatgggttttggtttaagatgcttgggcatgtttatccaccattacgagtggctatatacacggatgagttggaatttaaatggccttaatagctagttaggactggaaagaaatgcattttaaatttctgataaatggccgcgattcacatacaagtaaaatcagtctgtttaagagaatataactaaaccgagctactaatggattgaaacctaggttctgagtggtggacaaaaaatcttaatagttttcgaaacacttatttcattaggataccatatacttaaattaatttctccagtttaaagttgattgcaaaaatgcctaattaaatgtttcaggtaagttttttggaaatataaaacctttgtaccaatatcaaattataatgggttctttagttaaaatttaataaaaatcaaaatcttgaatagattcaattacccattttgacactttagatttttaattttagagttaattaaatgccgtataaatgttatcttaactatagattgcgaagtagaaataggtttgaaattcgtagcgtagacttggcgtacttacgactagaaacatacatttggctttacccatgcctggtataactatcgaacttattgtctaagcctctggtgccttcacaggatgtccgtgttcccctttagagaaactccgcgtcgctaaaggacgtgggaccatgaatcgagaacgcggatcttttccggctggtgtgggccagctatcatacctccgacatggctggcacggtaaccaccttggtgggacgttcgcagattaccacacgggcgttcgtcttgttggtggaccttcgggaaaccgtcaacgaagtggtcagtgtcctcatcgaatcgcaactgttgtgaagccgacgaccaaccgtgtggcagcggttttgctgcgagttgttgcggtatgacttgcagcagcatgtgaaccacttaaaaggcggaaagcgactggaaatataataaaaataaaaatatcaaagtaagtaaattaaagcataagaaaatgtgtaagattttttaacatgaaatcttaacataccttaatgtgcgaaagacctgcgatgagaagaggcaatagattagtggattcgccgccgagttcagcggtgccagactttggatgaaggtggcgatggcaatgttggtctgtgagtgtggaatctggccaaagacctgcagcagatcgaagatgatatacggcgaccagcagatgatgaacacaaacacgatggtcaatgtcatcttgaccgttttgacctttgcccgtggaataatgcccctcgagctggccctcctggcaggtgcagctccaaaaccagcacgttctgttaaaatataattaacaaataaaataaaattatttttgggaactccgatttggcaatatgcatagccagaagatatcttacccgtgggtacaaaaatggaaccctttgcccaaatcgtctttacgatgatcgcatagcaggcagatatgatcagcgcaggaatggcaaatagagtggccgacaccaggctcatgtacacctgccaggcgatcggtgaacccaactcaatccagcattgcggatgtccttggatgagcttctcctcgtacaaaaccaggatgggaagcgaaaacaacgccgagatgagccatgcgccagccaccaggtgacgggctcttttccctaaaagcataaaatttaaatatatatttaagtgaaatatatttctaatttaacttaaatttgtatattttttttggttaattcccgaactaaattatccaagcagtgtaagcagaagccacaaacagcgctcatctttggctaacaacatttggcaattagaaaacttttcatacgacgacttaacttacacgactttgagaagttcatggggtgtgtgatggcatcgtatctgtcgatgctcatggccaccagcacgtaggtggacgagtatgtgacgcagacctgcgagaagcggatggccttgcaggccaggttgcctgcccgccacgaaatcgtgatgcgccatatgatgtcggtgaggacgttgagcagtcccacgcacagatctggaaataatggactgggcattagaagcaagggaagaggtcagtcccaatcccaaaactcacctgccaatgccagctgtttaatgaagtagttcatccgcgacttgcgattcttgttgatgaacatcacgaacagaacagctgaattgcccagaacgatgacggtgaacaggatccagagcacagcaaactgttcggtctggaagagtgcaaagaacaaagtgtggtcacatttcattaaacgcctatcaagttcattgtcaacaaagtgttaagcacggaaatcacgcataaaactcaatttaatgccatccaagcacacacacacacacacgccttgtttatggctctttaaatagccataaaaatgatagagctatgaattcaagctggttggtgcggcgggcaggatgtgccggcggaagtttgcttcttccagttcagtactaacaagactaggacaacacgacatcctgcactcaaacacccgtggacgctcacccacacacccagacgtgatggaagacagacagccaccgttattccagcaggaaattgctgccaagatgaaggacctgcacttcgaaaaatatttctttcgacttttaaggcagtttcacagctcaaaatgcgtggcttggtatttaatttatagaacttatactccaggcattcgaaattcaattcatagcactcaaatctaaaattgtaacaattcttatatagaaaactagtagataaagaataatgaacccttattacttttacttttttaactgaactgttattattttaaaaatattttaaacagtgtgaagtgcagatatgacagtgagtagttctgctagttctagcttattgccgaagaaaatgaaatattctttatacgcccgcatgcagtttatatagcagaatatcgcatatatgctaatatgactaatgatctcttcatggtatctacaaagttttttgctgcaaattaaatttgctctcaaggcatctccccctatgcccacgtctattgaagttaagtttgaattatggcctcggggtcttgcagtctgacgccaacaccgatgttgatgcggacttacttaagggcaggccaagtaaacttgtcccgaaaaaaaagctgaaatcctgacaggcttcgtccttggaactgcgctcagactgaagacgccccaccttattctacaactttttgtccataccaaacttgcagtattcactttttg

SEQ ID NO: 47 - DNA, 1191 bp, Drosophila
atgaaatgtgaccacactttgttctttgcactcttccagaccgaacagtttgctgtgctctggatcctgttcaccgtcatcgttctgggcaattcagctgttctgttcgtgatgttcatcaacaagaatcgcaagtcgcggatgaactacttcattaaacagctggcattggcagatctgtgcgtgggactgctcaacgtcctcaccgacatcatatggcgcatcacgatttcgtggcgggcaggcaacctggcctgcaaggccatccgcttctcgcaggtctgcgtcacatactcgtccacctacgtgctggtggccatgagcatcgacagatacgatgccatcacacaccccatgaacttctcaaagtcgtggaaaagagcccgtcacctggtggctggcgcatggctcatctcggcgttgttttcgcttcccatcctggttttgtacgaggagaagctcatccaaggacatccgcaatgctggattgagttgggttcaccgatcgcctggcaggtgtacatgagcctggtgtcggccactctatttgccattcctgcgctgatcatatctgcctgctatgcgatcatcgtaaagacgatttgggcaaagggttccatttttgtacccacggaacgtgctggttttggagctgcacctgccaggagggccagctcgaggggcattattccacgggcaaaggtcaaaacggtcaagatgacattgaccatcgtgtttgtgttcatcatctgctggtcgccgtatatcatcttcgatctgctgcaggtctttggccagattccacactcacagaccaacattgccatcgccaccttcatccaaagtctggcaccgctgaactcggcggcgaatccactaatctattgcctcttctcatcgcaggtctttcgcacattaagtcgctttccgccttttaagtggttcacatgctgctgcaagtcataccgcaacaactcgcagcaaaaccgctgccacacggttggtcgtcggcttcacaacagttgcgattcgatgaggacactgaccacttcgttgacggtttcccgaaggtccaccaacaagacgaacgcccgtgtggtaatctgcgaacgtcccaccaaggtggttaccgtgccagccatgtcggagcgacgcggagtttctctaaaggggaacacggacatcctgtga

SEQ ID NO: 48 - protein, 396 aa, Drosophila
MKCDHTLFFALFQTEQFAVLWILFTVIVLGNSAVLFVMFINKNRKSRMNYFIKQLALADLCVGLLNVLTDIIWRITISWRAGNLACKAIRFSQVCVTYSSTYVLVAMSIDRYDAITHPMNFSKSWKRARHLVAGAWLISALFSLPILVLYEEKLIQGHPQCWIELGSPIAWQVYMSLVSATLFAIPALIISACYAIIVKTIWAKGSIFVPTERAGFGAAPARRASSRGIIPRAKVKTVKMTLTIVFVFIICWSPYIIFDLLQVFGQIPHSQTNIAIATFIQSLAPLNSAANPLIYCLFSSQVFRTLSRFPPFKWFTCCCKSYRNNSQQNRCHTVGRRLHNSCDSMRTLTTSLTVSRRSTNKTNARVVICERPTKVVTVPAMSERRGVSLKGNTDIL

SEQ ID NO: 49 - DNA, 5051 bp, Drosophila
ttccaatgcgatttaaggtaattgactataagtacccatgacgaacttctggacagttccccagtggaaaaaaaaaactggatttatttcttatcgcaaaacttgcgataaccaatttgtatatgttcattcagggagcgtgccgattttttagtttgcgaaattgagttgttatgttttctgagtcattgtcgagcgggttttggtagccggggattaaatctgctgtatcatcttggtccagcgtttatttctatttgcttttaatttcacaatcaaaacagcaataataaaaccgtgccttatcttacggacatatctccccaagcgtcgtctcgctctaatttggatttttcctctctctctcgctcttttcttgcagctggcgcccgacggtgggaatttcatcagctgttgttgttgttcatttcacagcagcagtcggcctaataaaaatgcaatttttatggttaagaaaatagtgcgcgaacgccgttgtgttgcacattggaaattgtgcagaagccagaagaaaatgtgtcttggaaaatggaaaagcacgagcagcagtagcaccagcagcagctataacattgagccagtgatgtaatacagagcaaaagtgaagcggcggcaattggcattgcaaaaaagaaacagattatacaatttgtgttgctgccgcactgaactaggacaacagcagcaacaacagcagcagcaacaacaaccactagtgataaagaccggctggcaacagtgcagcggccacttgcagcaacataatttcaaagtcggagcgtgggaatcgcaaatcacggcagtggcagcaacaacagcaactgcagcaacactcgagcactcgtggctctccggatcgctcatttcgctcgccgttctcgcgctggcgtttctccgtttcgctcgcacccgcctgtggagcagtcgcgtatatttggaggcgttggggcgaacgctcacgacagttgtgcttggaacgcttcggagtgaagatcgtgctcgtccgatcggtgcgcgtgataaatacacggcgaacaaaattgagtcaagagtcagacggtcgcaagacaattgacaagacacgaaaaatcataataaacacaagtggaaaagcaactgcttgagagcaaaaaagaaattgttttttacaaatctcgcacgtaaattagcaagcgttcgcaagaaacaaaccgcatacaatactgaacacaaaaaaaagggtattcaacaaaaaaccaaaaatatttggctgcaaatgtgaagagacgagagacagcggatatactaccgagtgaaatttgtgtcataagcagagccaaaacaaaaccgaaaagccaaattcaataaaaggccataagtgactgtgaaactgtaaagtgatgtgtggtaatcgaaaaacagcataaagaatggccatagacctcctgatcctggccctgctgctcgtctcgttcctgatcaacctgctggcgctgtgtgccttttggataacgcctggcttgaggaccaccgccaatcgctttacgatcaacctgctggccatcaatctcattggttgctgcatcttggcccccactttgttcctgggactgccgggaaagtctgcggaggcatccacttccaacgccgagaccctggagttcttctcgaagccgggaaaccatcaggtgatacttcgtcgcaatggccagctggtggaacaggacggcgtggtggtgcgaaggaacatcagcgaaaacggcgatacggtggagaccttcttcaagtgcaatgccacctactgtcgcgagttgaccatcgatgagcgcggagatggtggctttgtcatcacggaaaccgagacacacgaagagaatctctcggcctttgagagcttacccacggaggctcccattttgccgcccgtccaactgagatgttggtccatagacatgactgctgcgctgggagctctggcagtactgctcgtggtgggggacacctggtgtgccgttacggatcccctgcgctaccacagtcgcatttcgggcgtgaaaacctggatcttcatagcactcacctgggtggtgggcatactctttggagccctttccgccttccgagttttggactttgaggcggacgccctgttcagcagacaacgccgcctggcagtcacgtacttcaacatcagcagcaccaatagtattttcggagtggtgtacgccagtgtctacttcatcgtgatcatcctcctgcccttcggcttcgtgtgcggaatgtactggaggatattcagtgaggcgcgcggaaatgggctgcgcatgcgccagaatggctcttcgccgctgctgcagagcgccttgaatctgacggctggccagcaggcggctcaagccaaccagttctccaatagcttgtgtgttcatcggcattccatatcctcggccagttcgcatggcggcaacagcagcttgggcttgggcggtctgcaaatgcaaattgatcagcgccaacagccgaggagttcgcccagttgtctccgtcgggactcggccgcgaaagtacttttgcccaccatctcggatgatggtggctcagatgcggaaagtggagccggagttcaactgatgcccgtacaggagcactcactgtcagatagaaatcagaacattatgcttactctgcaaacagccagtggtgaaataaagaggaactactccgccagacagctgcccctgttgggcacttcttcgcaggatctgagggagactaatcgtctgcagggcatacgccaggtgcacagttcgcccaatctccacaagtacacggaactgcgccaggactcgctcagtgaggagtgtggttctccgcatcttttgggtcacgcccagcggcagcagcagcagcaattgcacctgcaacatcagcagcaacagcatcatcaccaccagcaacatcatccgcacttcagttcgccgcgccaccagcaacacggccacgccctccagatacccgccattcatgcctcccccaaggctctgagttacatgagctccttgcgacaccgtttgagcaacgccagttcgctattcaaataccgtgaggagtcgagagcagcccgcatcagcatcctggtggtggtgatgtttgtggtctcgtacctgcccttcggactgctggtactcctgcaatcgcgactgtcggctgctaactttggcggatcctcccagctggccatcttcatgatcctgctggccaatctcagttcgccattcatcttcgcctacaggaacaagagggtgaggcgaggagtcaagcggctgtttggtctggattcgtcgtcgggcctgcagcgcaactgcagcagcagtgtaaagaccaatggcaccgcaggtcctgctgcaagtggtgcacaattgcagcgcaacagcagcaagttgtcgcagtacagcagcaacagctgcaagtatctcaccccccagagttccctggtcagtcaagtgccggtgcatacgaccttgacgttaaggcccaacagcagctgcagcaccatcatcaatttcggtggcgccaggggctcagcggactccgatgagcagccaccggcaacaccaccacctactgtggcagttgctccaccgcccacacgaccgcagcgccccaagctgcagaggggcatcaccatcgttgagcacatagctataacaccaaccatgccccaaaagttccagaatcggcgcgccaggctcttcgacatgttcttccgcagctccaagaaactgcaggcgggctgccagagccagagtttgcccactgaggtctaaacggggggttatgataactatacatataggaaggtaaacaaacactaaacttgcttgctgaagaattctaagaacagtattcgtaatttgtaagtctagcaattaacaaagacaactgtttgaatttgagttttaagaccagatcatgctgtcctagaagcttctcatgccaaaaaacaaaaccacaaagaaagtcaaactagaaagtttgagatgctttaaattaacaaaaaaagaaaagaaaaaaacaaaaaacaaaacaaagtaccttttaaaaaatagaaaactgtgtacaagtcaaattaacaaagattgagagtgatgggagttataatcttagggtggatatcaaactgaaaagtggaaccaagccaagccaagttgagatcgtaatcaatgtacctaagcaacttgcatatgaacatttaatgtttttactcagatgaaatcacaggaaaatagcaaagacagcacagcttattcgaacttccccaactagtttattatttattgaaacaattgtaaatatttattagacatccacgccgcaaagctttaactccaaaaacattctggctaaacaagaagagacgcatacattcgattcataagttaattaagtcaatgtgcaaagcatatgtgtattctagagtttaagttgtagagccgagtagtcttacaccgagcacctagtgccgagcagtgctttttcacctgcccaactggagcgtctgttgcaggcggcattttcatattgaaaatgcattttggccagtgcacagttggttttccagttggccagaatgtcagtcagcagttagttagcctttggttagccaacggctattgggccattaagtcaatttgctttttagaacaccgcgggcattgcgtgcagctaaatacctcattagttataatttgaagtgcgagatggatggcggcaataggtcaaaggtcggagccatcggcacggcccatgcataatgcatggaaaatgttcgattgcccctggcatttgtatcatttgctttactatgctgcaggccagaaagctttataccttaagttctcctgctttgatttcccttggctgcacaaaaaggcaacaaaagcaacacacactcacacaacacaaaaaaacctcgaatttatatttctaaagtttatattttataaagagtgtgtgcataggaaatatctataaatattcatgcatgtgtg

SEQ ID NO: 50 - DNA, 3051 bp, Drosophila
cttcggagtgaagatcgtgctcgtccgatcggtgcgcgtgataaatacacggcgaacaaaattgagtcaagagtcagacggtcgcaagacaattgacaagacacgaaaaatcataataaacacaagtggaaaagcaactgcttgagagcaaaaaagaaattgttttttacaaatctcgcacgtaaattagcaagcgttcgcaagaaacaaaccgcatacaatactgaacacaaaaaaaagggtattcaacaaaaaaccaaaaatatttggctgcaaatgtgaagagacgagagacagcggatatactaccgagtgaaatttgtgtcataagcagagccaaaacaaaaccgaaaagccaaattcaataaaaggccataagtgactgtgaaactgtaaagtgatgtgtggtaatcgaaaaacagcataaagaatggccatagacctcctgatcctggccctgctgctcgtctcgttcctgatcaacctgctggcgctgtgtgccttttggataacgcctggcttgaggaccaccgccaatcgctttacgatcaacctgctggccatcaatctcattggttgctgcatcttggcccccactttgttcctgggactgccgggaaagtctgcggaggcatccacttccaacgccgagaccctggagttcttctcgaagccgggaaaccatcaggtgatacttcgtcgcaatggccagctggtggaacaggacggcgtggtggtgcgaaggaacatcagcgaaaacggcgatacggtggagaccttcttcaagtgcaatgccacctactgtcgcgagttgaccatcgatgagcgcggagatggtggctttgtcatcacggaaaccgagacacacgaagagaatctctcggcctttgagagcttacccacggaggctcccattttgccgcccgtccaactgagatgttggtccatagacatgactgctgcgctgggagctctggcagtactgctcgtggtgggggacacctggtgtgccgttacggatcccctgcgctaccacagtcgcatttcgggcgtgaaaacctggatcttcatagcactcacctgggtggtgggcatactctttggagccctttccgccttccgagttttggactttgaggcggacgccctgttcagcagacaacgccgcctggcagtcacgtacttcaacatcagcagcaccaatagtattttcggagtggtgtacgccagtgtctacttcatcgtgatcatcctcctgcccttcggcttcgtgtgcggaatgtactggaggatattcagtgaggcgcgcggaaatgggctgcgcatgcgccagaatggctcttcgccgctgctgcagagcgccttgaatctgacggctggccagcaggcggctcaagccaaccagttctccaatagcttgtgtgttcatcggcattccatatcctcggccagttcgcatggcggcaacagcagcttgggcttgggcggtctgcaaatgcaaattgatcagcgccaacagccgaggagttcgcccagttgtctccgtcgggactcggccgcgaaagtacttttgcccaccatctcggatgatggtggctcagatgcggaaagtggagccggagttcaactgatgcccgtacaggagcactcactgtcagatagaaatcagaacattatgcttactctgcaaacagccagtggtgaaataaagaggaactactccgccagacagctgcccctgttgggcacttcttcgcaggatctgagggagactaatcgtctgcagggcatacgccaggtgcacagttcgcccaatctccacaagtacacggaactgcgccaggactcgctcagtgaggagtgtggttctccgcatcttttgggtcacgcccagcggcagcagcagcagcaattgcacctgcaacatcagcagcaacagcatcatcaccaccagcaacatcatccgcacttcagttcgccgcgccaccagcaacacggccacgccctccagatacccgccattcatgcctcccccaaggctctgagttacatgagctccttgcgacaccgtttgagcaacgccagttcgctattcaaataccgtgaggagtcgagagcagcccgcatcagcatcctggtggtggtgatgtttgtggtctcgtacctgcccttcggactgctggtactcctgcaatcgcgactgtcggctgctaactttggcggatcctcccagctggccatcttcatgatcctgctggccaatctcagttcgccattcatcttcgcctacaggaacaagagggtgaggcgaggagtcaagcggctgtttggtctggattcgtcgtcgggcctgcagcgcaactgcagcagcagtgtaaagaccaatggcaccgcaggtcctgctgcaagtggtgcacaattgcagcgcaacagcagcaagttgtcgcagtacagcagcaacagctgcaagtatctcaccccccagagttccctggtcagtcaagtgccggtgcatacgaccttgacgttaaggcccaacagcagctgcagcaccatcatcaatttcggtggcgccaggggctcagcggactccgatgagcagccaccggcaacaccaccacctactgtggcagttgctccaccgcccacacgaccgcagcgccccaagctgcagaggggcatcaccatcgttgagcacatagctataacaccaaccatgccccaaaagttccagaatcggcgcgccaggctcttcgacatgttcttccgcagctccaagaaactgcaggcgggctgccagagccagagtttgcccactgaggtctaaacggggggttatgataactatacatataggaaggtaaacaaacactaaacttgcttgctgaagaattctaagaacagtattcgtaatttgtaagtctagcaattaacaaagacaactgtttgaatttgagttttaagaccagatcatgctgtcctagaagcttctcatgccaaaaaacaaaaccacaaagaaagtcaaactagaaagtttgagatgctttaaat

SEQ ID NO: 51 - protein, 798 aa, Drosophila
MAIDLLILALLLVSFLINLLALCAFWITPGLRTTANRFTINLLAINLIGCCILAPTLFLGLPGKSAEASTSNAETLEFFSKPGNHQVILRRNGQLVEQDGVVVRRNISENGDTVETFFKCNATYCRELTIDERGDGGFVITETETHEENLSAFESLPTEAPILPPVQLRCWSIDMTAALGALAVLLVVGDTWCAVTDPLRYHSRISGVKTWIFIALTWVVGILFGALSAFRVLDFEADALFSRQRRLAVTYFNISSTNSIFGVVYASVYFIVIILLPFGFVCGMYWRIFSEARGNGLRMRQNGSSPLLQSALNLTAGQQAAQANQFSNSLCVHRHSISSASSHGGNSSLGLGGLQMQIDQRQQPRSSPSCLRRDSAAKVLLPTISDDGGSDAESGAGVQLMPVQEHSLSDRNQNIMLTLQTASGEIKRNYSARQLPLLGTSSQDLRETNRLQGIRQVHSSPNLHKYTELRQDSLSEECGSPHLLGHAQRQQQQQLHLQHQQQQHHHHQQHHPHFSSPRHQQHGHALQIPAIHASPKALSYMSSLRHRLSNASSLFKYREESRAARISILVVVMFVVSYLPFGLLVLLQSRLSAANFGGSSQLAIFMILLANLSSPFIFAYRNKRVRRGVKRLFGLDSSSGLQRNCSSSVKTNGTAGPAASGAQLQRNSSKLSQYSSNSCKYLTPQSSLVSQVPVHTTLTLRPNSSCSTIINFGGARGSADSDEQPPATPPPTVAVAPPPTRPQRPKLQRGITIVEHIAITPTMPQKFQNRRARLFDMFFRSSKKLQAGCQSQSLPTEV

SEQ ID NO: 52 - DNA, 3919 bp, Drosophila
attctattgtcgtaggcgtggcaaaaggttttttggtaaatcgatagaaatgtacaagagaatgtaattaatatgaaaaggtaacaaaaaattttgcaaaagtgtgggcatggcagttttggtcggtttgttggcgtaagggcattatcggtattttcctattttcagctatatgatgcagtcgcctaattttgatcaaactataactaaaattgtatattgtcagaaacaacgagcatgaatttatagtcaatttatctttttattatttcttatctaaagttatatgcatatagaataaaaacagatacgagcttccttagaagcggacggaaataatgtctcgagatctggaccttcattaagacagacgaacattaggacaaggccaggtctactcagctagggatcctgatcaatgtatatgtatttactttaaaggggcgtaaacttgtattttacatgttacatactttcaagcgaatctagtaaacccttttaatttacaagtaacgaatataaaaagttgaatggtagcgggagaaaattaattgtataatataatattatctttgttaatccagagtcttggcaacttgtgcacacaattttttttttttttttggaaactgaatcagttaattgtgccaaaatttagagtgtagatttcttggaaatctcaatgaattttatggtcaagttccaagaagtgaaatgcttaacaaacaacaaaaacaaaacacacaaaagcaaacaaattatgcagaattatcggatgtattttatatgtatgtatgtacatacatatacaaagaataataaatgggtgggtctgttggcttctatggaatttccaatttaagctgcaatacatgtacattttaacgtctttctgtacgctctcaaataaaaaaacacaattttaggattaataaaaaaacagatatgtacgtcttctattcccatatgaagaaaaatattcatatgattttttgtttggcaggaaatgcgaatagttattggatcgttcaccgcatttcttttgctgttattgcaaaactcaaatgccgaaattcccggttgcgacttcttcgacaccgtagatatttcaaaagcgccaagattctcgaacggatcgtacctctacgaaggcttgctgatccccgcccatttgacagctgaatatgactacaagctcctggccgacgattcgaaggagaaggtggcgagccacgtacgaggatgtgcctgccacctcaggccatgcattcggttttgttgcccccagtaccaaaagatgcaaaagagcaagtgctacggcgacatgtcggaggacgagctgaacaagcacgatcccttcgtgaacgtgacgctcagcgacgggtcggtggtcaggagacacttcaaggaggatctgatcgtgcagtcggatctggccaagcccggatgtccccggatgtactttctgaatcacgaactgccgggcaatgaattcactctgtttgaggttactttcctgtgtttctgtcacttctgaagatcgtaaccttttttgaatctctgtagaacggctctcttctgcgtcactgggacaaagtggaactgagcaagccgggagtactgcgtccagcatctttcatttaaggatgatagtatccgaattgcaccccacttctgtccactttcgtctgagcactccagaacgtggaagaccgttggtaagctgaattccctgcttgactttaaggtttttagttaatgtccattttcacagcgatagtgatatccttgatatgcataatcctaacgatcagcgtgtacctctatgttgagaagcttcgcaacctgcacggaaagtgtttcatctgctacttggcctccttgttcctgggatatttcttcctggtcctcaacgtgtggaaatactcctccggcttctgcgttacagcaggtttgcttgtggcgattacaagataaaggacgaccaatttcacatttcgatatcatgatcagggttcctgggctacttctccgtcatcgccgcgttcttttggctttctgtcatcagtcttaccctctggaattcatttagcggcaactccagctggttgaaccgtttcttgccacagaatcggttcctttcttacaatttatacgcctggggcatggcgctgctcctgactgcaatcacctatatagctgaccaggtggttaagaacgagaagttgagaccccgcgtgggcgtcggcaaaaattgttggatctacagtaagttactattcctataataacaattgcggtgtaactcgttttttttttaaccaacagctggggatatgactgtcatgatctacttctatggcccgatgctactgataattgttttcaacataacaatgtttgtcctgacggcttttcgtataatgaaagtgaagaaggaagcacaaaactttactcaacagcaaaaaacaaccaataggctcaattcggacaagcagacgtaataattttaccatattttatacagttctaaatccaaaagtttaaattttaaattattttctatggcttttaaagttacgccctattcctgcgactctttatcatcatgggcttgtcctggagcttggaaataatctcgtttttgttgagcaaaaatcaggcttgggccaaggcttttatggtggctgattacttcaattggtcacagggcaccgtcatatttctgctatttgttctgaggcccagcacactgaagctactgaaggaacggtaagttatcggttcttccataggaggtccaattaacctggttctatcatctggctgagcaggattaagggtgggagggatgaagccggcgccagcgatgaacatatctcacttcagaatacgaaaattgaccccagtgttttttaatatatgggtaatgtgaaaatacagtttattagttcatttggtgttggaaaccttctattttgaatcactaacaggcagcctaatgatcgtgaccaaaggctgctttgcttgctcattattgctcacatatcgtatgctcatatgggctacgaatatttgctacttatcacttttcaagtatcttgatttctgcacggtgtctaagcatatctaagttttaattaaatgttgaatgtaattgtcctttaagttataactttttgcaataataatctattccaatccatcctagacgtgccatcaaagcgagatcaaagcaactactacatggggatatgtacgaatcttataggcatgaatactcggcatttatataccctggtctattattatggatggaggataaaaactcaggaaaatacttttcgcatcagcacttatgtatgctcactcgtgataataatttcgtaataattcgtactgtttttactgcctcaacttaattcaaagaactacaaatgattatattatgactttttatgacaatgactaactaaaaataaaaatttctgaatatttataaacaactttaaaatgttattaacttaggataataataataacacagttttaatttatcaagcacatcgttaaaaaacaataaattacttgaatataaatttaaaaaaaaaatggaatattggtttacattaacggtatgcaaaaaatcataaaaagtcatagaactgaacgatagagaaaattacaaaaaaacgatctagtcgagttcctcgactataagatactcatttctcagctagttctttcatttaaaaatttctctttcgtttcgatagtaattggcaagaaaaaataataaaatacaacaaattaatgcatttttgaaaattatgggcgtgactgatttggtcggttagtggacgtgtcaatattatgaagcaaacgtggacactacaaactgaaatatatatatatatat

SEQ ID NO: 53 - DNA, 1547 bp, Drosophila
caggaaatgcgaatagttattggatcgttcaccgcatttcttttgctgttattgcaaaactcaaatgccgaaattcccggttgcgacttcttcgacaccgtagatatttcaaaagcgccaagattctcgaacggatcgtacctctacgaaggcttgctgatccccgcccatttgacagctgaatatgactacaagctcctggccgacgattcgaaggagaaggtggcgagccacgtacgaggatgtgcctgccacctcaggccatgcattcggttttgttgcccccagtaccaaaagatgcaaaagagcaagtgctacggcgacatgtcggaggacgagctgaacaagcacgatcccttcgtgaacgtgacgctcagcgacgggtcggtggtcaggagacacttcaaggaggatctgatcgtgcagtcggatctggccaagcccggatgtccccggatgtactttctgaatcacgaactgccgggcaatgaattcactctgtttgagaacggctctcttctgcgtcactgggacaaagtggaactgagcaagccgggagtactgcgtccagcatctttcatttaaggatgatagtatccgaattgcaccccacttctgtccactttcgtctgagcactccagaattaatgtccattttcacagcgatagtgatatccttgatatgcataatcctaacgatcagcgtgtacctctatgttgagaagcttcgcaacctgcacggaaagtgtttcatctgctacttggcctccttgttcctgggatatttcttcctggtcctcaacgtgtggaaatactcctccggcttctgcgttacagcagggttcctgggctacttctccgtcatcgccgcgttcttttggctttctgtcatcagtcttaccctctggaattcatttagcggcaactccagctggttgaaccgtttcttgccacagaatcggttcctttcttacaatttatacgcctggggcatggcgctgctcctgactgcaatcacctatatagctgaccaggtggttaagaacgagaagttgagaccccgcgtgggcgtcggcaaaaattgttggatctacactggggatatgactgtcatgatctacttctatggcccgatgctactgataattgttttcaacataacaatgtttgtcctgacggcttttcgtataatgaaagtgaagaaggaagcacaaaactttactcaacagcaaaaaacaaccaataggctcaattcggacaagcagacttacgccctattcctgcgactctttatcatcatgggcttgtcctggagcttggaaataatctcgtttttgttgagcaaaaatcaggcttgggccaaggcttttatggtggctgattacttcaattggtcacagggcaccgtcatatttctgctatttgttctgaggcccagcacactgaagctactgaaggaacggattaagggtgggagggatgaagccggcgccagcgatgaacatatctcacttcagaatacgaaaattgaccccagtgttttttaa

SEQ ID NO: 54 - protein, 192 aa, Drosophila
MRIVIGSFTAFLLLLLQNSNAEIPGCDFFDTVDISKAPRFSNGSYLYEGLLIPAHLTAEYDYKLLADDSKEKVASHVRGCACHLRPCIRFCCPQYQKMQKSKCYGDMSEDELNKHDPFVNVTLSDGSVVRRHFKEDLIVQSDLAKPGCPRMYFLNHELPGNEFTLFENGSLLRHWDKVELSKPGVLRPASFI

SEQ ID NO: 55 - DNA, 3640 bp, Drosophila
aattaatgcatttttgaaaattatgggcgtgactgatttggtcggttagtggacgtgtcaatattatgaagcaaacgtggacactacaaactgaaatatatatatatatatcatttcattgcccttaagtctgaaaaacggctttaaaattgagaagttactttaagagatattcgaggtattcggtgacagcagcgcacattatcgactggccaatgggaatattagatttgtagaatagggtaatatgtaaacgtaaacctttcgattgtataaagcattcaattcctaatatggatatgtccgttcaccagcctgtattaactttgcgtgttattacttaaatttatctttctatgtacatgccagaaactgatagaatggcacggttaccgccgatagtcgctgagtatggggtatcttatagtcgagcacattctcgttctcccttgacatcgcatatatcggttgagttgttcgcattttgggatcagtcatcttaaaactctggtcgcataaacatgttttttgtgttagtcgttccatttgacccttgcgtaagtatttatattcaaagtttttacgattttggatcgttaagcataagaaggaccactcgagtacgatttgaccgtttttatacaatttcgtcctcttagacgaataaatattgtgcctgccttgtttctaaaaatgaacttgcttcagcttcgtagagaatgcttagtcataacagatggatttgttgaatttatttttaacagttgataagttatacttttataaaaaaaaaaaaacaacttactcagaatgctatagcacatgactcaattttttgtttttcataagtatttagatcagttttcagttttgcggaggttattttgctactttatttctaattgtgaacacgtaacttggtttaaaaccgtatatacttacagaatagcatacatcatttgaattcagttgcctatcatattaatttcctttgcagaaaatgcggatattgttaattgcagttctttttctgttgatgccaaaatcaaatgccgaaattcccggttgcgacttcttcgacaccgtagatatttcaaaagcgccaagattctcgaacggatcgtacctctacgaaggcttgctgatccccgcccatttgacagctgaatatgactacaagctcctggccgacgattcgaaggagaaggtggcgagccacgtacgaggatgtgcctgccacctcaggccatgcatccggttttgttgcccccagtaccaaaagatgcaaaagagcaagtgctatggcgacatgtcggaggacgagctgaacaagcacgatcccttcgtgaacgtgacgctcagcgacgggtcggtggtcaggagacacttcaaggaggatctgatcgtgcagtcggatctggccaagcccggatgtccccggatgtactttttgaatcacgaactgccgggcaatgaattcactctgtttgaggttactttcctgtgtttctgtcacttctgaagatcgtaaccttttttgaatctctgtagaacggctctcttctgcgtcactgggacaaagtggaactgagcaagcgggagtactgcgtccagcatctttcatttaaggatgatagtatccgaattgcaccccacttctgtccactttcgtctgagcactccagaacgtggaagaccgttggtaagctgaattccctgcttgactttaaggtttttagttaatgtcctttctcacagcgatagtgatatccttgatatgcataatcctaacgatcagcgtgtacctctatgtcgagaagcttcgcaacctgcacggaaagtgtttcatctgctacttggcctctttgttcttgggctatttcttcctggtcctcaacgtgtggaaatactcctccggcttctgcgttacagcaggtttgcttgtggcgattacaagataaaggacgactaatttcacatttcgatatcatgatcagggttcctgggctacttctccgtcatggccgcgttcttttggctttctgtgattggaatccacttgcggattaagtttagtctagcctctaactgtttgcaccgattgctgccagaaaatccgttccgtgcatacaacttatacgcctggggtataccgctaatcatgactgcaatcacctatacagctgaccaggtggttaagaacgagaagttgagaccccgcgtgggcgtcggcaaaaattgttggatctacagtaagttactattcctataattacaattacggtgtaactcgttttgttaaccaacagctggcgatatgactgtcatgatctacttctatggcccgatgctgttgctaatcgctttcaacataataatgtttgtcctttcggcgatttacatatataacataaagaaaaatgtgaaaggccttgtccacaagcaacaaacaaaccaacagataaatgaccaacaaatgtaattatattatattataagataataactataatgtcaaatggcactttttgtaatcttttataggtttgctatattcctgcgacttttcatcttaatgggtttgtcgtggagctttgagatattatcctttttgttaaccaaacagcaagcttgggctagggctttaatggtggctgactactttaattggtcccagggtaccatcatattcgtgctttttattttaaagcctagcattctaaaacttataatagcagggtaagtaaagtattacaaataaccttgaaatttgaccgtctcatacgtatgaacaatcttttgatttaggggacgtcaaaacctcccaggaagtcaccataattcgagatcaaaagcagctcgatataattcaactcatacggcttgtgaaggatcaattgcggatccaaacgcttactgctaaaaaaatggaattcaataagatgcaacgtctctgttattgatcacattattttaattttctatggagcaaaagtttaaaaaaaatatttgttatcaagacaataaataatgtcttggaacatataaagcaaaatatattaaagggtacaaaaaacaggaaaagtatggggcaatacagcaaaatatttttcggatcatcaacttttttgtaagacaaaatgtagaaatatttctggcaccgttgtttcaaaccagggtttgagtcaacaatgctggcccaccactggcaagtaccaaacgattacagaaaactttttctaatcgattaagcatcgggggtcatcgatgtttctccaccactacaatttcatgttgtttttttagtcgcggctgtttgacgtttgtcgctttcctccgttgcgaatataatatattacgtagctcatttttatacaaacggaattacgagcgcaacgacgacagcaacactagtagcactaatcgtaagcgcaggggccaaaaattaaattgcgtttgcggccgcaaagatttgatgacgtcgcatacgccgtcttctagggcgtaaaaagcaaagcaaagcaaacaaacgcgaaagcgaaacgtgtaaacggcgtagaagcgataaacgcgactcaaatacgcagcagataaaatacaatacgcgagaagagaaaagtcacgggaaatattgttcata

SEQ ID NO: 56 - DNA, 1089 bp, Drosophila
atgcggatattgttaattgcagttctttttctgttgatgccaaaatcaaatgccgaaattcccggttgcgacttcttcgacaccgtagatatttcaaaagcgccaagattctcgaacggatcgtacctctacgaaggcttgctgatccccgcccatttgacagctgaatatgactacaagctcctggccgacgattcgaaggagaaggtggcgagccacgtacgaggatgtgcctgccacctcaggccatgcatccggttttgttgcccccagtaccaaaagatgcaaaagagcaagtgctatggcgacatgtcggaggacgagctgaacaagcacgatcccttcgtgaacgtgacgctcagcgacgggtcggtggtcaggagacacttcaaggaggatctgatcgtgcagtcggatctggccaagcccggatgtccccggatgtactttttgaatcacgaactgccgggcaatgaattcactctgtttgagaacggctctcttctgcgtcactgggacaaagtggaactgagcaagcgggagtactgcgtccagcatctttcatttaaggatgatagtatccgaattgcaccccacttctgtccactttcgtctgagcactccagaacgtggaagaccgttgcgatagtgatatccttgatatgcataatcctaacgatcagcgtgtacctctatgtcgagaagcttcgcaacctgcacggaaagtgtttcatctgctacttggcctctttgttcttgggctatttcttcctggtcctcaacgtgtggaaatactcctccggcttctgcgttacagcagggttcctgggctacttctccgtcatggccgcgttcttttggctttctgtgattggaatccacttgcggattaagtttagtctagcctctaactgtttgcaccgattgctgccagaaaatccgttccgtgcatacaacttatacgcctggggtataccgctaatcatgactgcaatcacctatacagctgaccaggtggttaagaacgagaagttgagaccccgcgtgggcgtcggcaaaaattgttggatctacacaagcttgggctag

SEQ ID NO: 57 - protein, 362 aa, Drosophila
MRILLIAVLFLLMPKSNAEIPGCDFFDTVDISKAPRFSNGSYLYEGLLIPAHLTAEYDYKLLADDSKEKVASHVRGCACHLRPCIRFCCPQYQKMQKSKCYGDMSEDELNKHDPFVNVTLSDGSVVRRHFKEDLIVQSDLAKPGCPRMYFLNHELPGNEFTLFENGSLLRHWDKVELSKREYCVQHLSFKDDSIRIAPHFCPLSSEHSRTWKTVAIVISLICIILTISVYLYVEKLRNLHGKCFICYLASLFLGYFFLVLNVWKYSSGFCVTAGFLGYFSVMAAFFWLSVIGIHLRIKFSLASNCLHRLLPENPFRAYNLYAWGIPLIMTAITYTADQVVKNEKLRPRVGVGKNCWIYTSLG

SEQ ID NO: 58 - DNA, 7503 bp, Drosophila
gattgccgtggtcgtgcgccgcgggagaaatgcccttttcgtgtacgcaattactaggcaaaaaggtttggacggcccttgctttattaggccataatttacgctgtcgagcggccattagagcggcatccgctggccaagttggtctataaaagcccggcggctgcaagtggcgttttccattccacgtgaaaggacactcgcagtcgggccgacgagatgctgcgccacctgctccgccacgagaacaacaaggtcttcgtcctgatcctgctctactgcgtcctggtcagcattctgaaactctgcacggcacagccggatagctctgtggccgccacggataatggtatttgataaggcatttgataatatcatattattcgctctaatggattccatttaccatccagatattacgcatcttggcgacgattgtcaggtgacgcccgtcatccatgtgctccagtatcctggatgtgtgcccaagccgattccctcgttcgcctgcgtgggtcgctgtgccagttatatccaggtgggtgttgatatacttgaaatataaattataatttgatataatctgatgactttaggtttcgggcagtaagatctggcaaatggagcgttcctgcatgtgctgccaggagtctggtgagcgggaggcagccgtctcgctattctgtcccaaagtgaagcccggcgagcgtaaattcaagaaggtcctgaccaaggcgccattggagtgcatgtgtcggccatgcacttccattgaggagtctggcatcataccacaggaaattgccggctattcggacgagggtccactcaacaatcacttccggcgcattgctctgcaatagattcccccatcagtttagcactcatacccatgcccatttgctcattaaaataaattagagttgccgtttctgcttgtacacagtgaaaaatgtgcctctgaaagctcatgccagtgaaagggaaacatcagcagatatatgattattttaaattgtaatttatttcccaactatctcatgtcattgctactagttcactaaatggtgtgtgtcctgcttcacagggtatgtatgtagatgcgtaactccaaagaaaacaaagataatctttacactgcaactggatctaacaataggagtttaactacggcataatgcatatgactcgcgccgcctacaagtactcgacgatatcgcatttgatggatatattcggacagctctggcccacggcactgcggccccgatagttgggactcttctcggtgaggagtttccggaagatgggcaaaattgccgtctcgccctcgagcagttccgtctcgctgctggcgccgtagatgctgctatcctgcttgccgcgctgcctgctccgctgcttatcgggcgccacattgggcgaactgtggtggtgggcggcgtgctggatgttagagctccggctgaccttacgcggctggacgcacggctgactgttgggcggcggatctcgttcccgttcgctgtccgtctcgctctggcaaacggtgcccttttgcggttttggccgatgtttgttgcggttcttctcggagacggaccgctggatgggcgaggtggtgttcgggtcataggtcatcccgtggccgccatgatgttccgcacagcgctgcggactggcgtagttccgcggcgactggcgctgcttggcgtgcgacagcgtgtgcgtgtcccagaggtcactctgtgaaaccacgaaattggacttcagagcggagcccatgctggtgcggcgatggtcggaggcagtgggagctattttcgattagaaaatcgatagtattatagtattataagagacgcgcagaaaacttactcttaatcacagccggagtactgggctttgagtgtggacacatgttgctcaactccgattgcgatgtggagatgttggtggaggagttccggtgcgagctgctgtactttggccgggcggtgggcgtctggctgccactgtcgtagtgcctggaggcggtcgattgacgcctctcccgcatgctggagcagtctcctccgctccgcttgcccgccgtactggtgatgctgcctatattatcatcggtctgagcggacaccgagtttctcttctccagatggcgatgatgatgctgctgctgctgctgttgctgttgcatctgctggtgttgctgctgctgcaggtgctgctgctgcatctgctgatgttgctgtaagtgctgctgcagttgctgctggatgggctgcatcatagttggagcaggggcatgcgagtggtgctctacaatcgattgctttttctttttgctgttggagaatatccatagattagagtgtatttaagaccaaaatttaagaacttacggaggaagcgatggcgccatcactgtagactgcaccgacacaaaggagttatccatctccacatgagtcgaggtcacactatccacggacgtcatctcggtaacttctatgacaaacgggttgcaatgcatgaacatatctacgaaatccccctccttagccactcacctgtggtgctgggcatctctcgacgcaccggtggagctgagagcctaacaatgtcatcgttcagtatgggctccagttcgctaccgacgttggagccacctgtgcaggtcaccccatcgatccatttgcgtgcctcgggtcccagcttgcggattaaggcctgcagctcgttctccttctccatcagcgcctttcggaatcggcagtttgtgttctttacatctcgcaatcgttgctccagttcgcacaccgaggaatcccggcgtccgtttttggacatgggtctcaacgtggccctaacgcgtttgtccaccacgccctggggattccgcttcagctccaccaactgcaaaacgattcgcatgaatattaaccaaagattatactacgcggtcaacatctaggaaggatcaactctacggacagtaatataggatagttaaagatattccaacagcaaggaagtgggatttgcctacaaccttgctgctgctcttagtgggttctatatagttcaagtttatagttagtctgtagtgttatatagcattttaagatctgttttcgagtacatgttgtttctgtatcaaggtgtatcaacgctagacgaaagatcagctcagctggcggtaaagtacgatcagttaagaagctctaaccacaactgatcggcctattaccgccgacaaacaacattcatattacacgattattatatgtaacatataacagctacaaaaactacaaaacttccttactaccagtcttactttcggtacgaacaccaaacacaaagtggctgtcgtacaaaaaatgataaaaaacgagagtaagacaaaaactaaatcctttcgatccgatagcaccagggatatagccgctccggccagacaagtgatgaacacgttataaacggagaaaccaatatgcttggaatcgttcagagccggtatagaaacatgtcgagtttcccaggccaaaaaggcgccaaaaacctattgaaaaaaattattgctttattataatgatatcttacaaattaatgtttattatatactcaccaacaacagtcccttgtaggcataaataatgctaacgaatatggtcatgtgctcagactggcagtactcgttttcggggatcaccaagacatcatcaatattctcgtgatgctgtagttaataataatcattttagatttttcacttcaaatatgttctatcaatgcactcaccaagggttccaactgtttagtttcgcggtaaaagggatcggcaatctgccaggtggttataatggctatatcaatggccaaaagcacgcccacaaccataaacaattgatagtccttgatcaccttcttattgagcttcagatcggtgaatatcgaatgcacccgccacgtcttcgagaacatggctccaaaactgagactgaatccagccatcaagatccaggctcgagctgtgcagatatagggaaaagctgccacactacttaatgtggtatcgagacccaggaaaatgatgctcaaataggtcatcatacagcccacaatgatcagattgttcaaatggggactggacatcttgatgtatctataaaaacatcaatattttattaaacgaaattgtttaatatagcattgttaagctcacctttgattgcgatacttaatgttaaaggccagaaaaactgtggcaataatcactccaatgaccgaagcactagccgatacaatatatatggttggattgacctgactgtgctcgatgtagatcaaagtgcgatccttgggaggagttttccccacccatttgactggttttcccaagcttaaatccaagtgtgacttctgtgagtggtattccccgatcttttccatttgtcccagctgaaactgattgatcaggatgttggccttgcgctcgttgttgtagaaacgcacgggtcccttgagaatgtaaaatatgttttaactgcaaaaactggattgtttatctatctaccgtcacaccctcgaaggatgtattacgtagagcctcaaggaagacactctcccagtccttcacgcgataatcaaaatgtgttagcagatcctctcgcttttcggccacatactgaatggccagggcagctgcccagataccatcgtaggtatagccatgaaagcgggaatattcagtgcctcgcagtctgtcgtactccacaagatactcatcagcagtctagtaaaatatgaaatttattacaagaattttaatagactttactggtactaacaatgccagccactgtgatgtcaccactggtggacaagggcaaaagatccactagaatggcaccttccaaggctgtagcgatctcctccacactgcactcgctgtcctgcgtgacattccaccaatccgtggaataggtagccatgatcagccattgataggctctgccatacatatccaatctggaagggagtttattgcaataattttaaattgagacttaagttagtatatccaactcacttataagcctcacagaatgccttgcgtgcaaagtgctcgttaaagttgcccagaatgatcctcacgtccttctcgcgcagtttcttcaatgattcagccacatcgttgacgaagctctgcgtttccaccacctcgacctccatggcatccaggtcagccaccatgtgattgtggggcagcgaatagcgtggctcattctggtagacagtgcccactctggtccaattgaactccttcagcaaggccagtcgcggcgcattaaaggcattctccgagggtaccacgcgaaagaaattcggaaacgcatccttggtgaacatgggatgggtgtccgcgtagctgagctgggtgaggtgccagtgcttgctggccttggctatgggatcggtcacatgggtgcacgcagcgccgaagagcatcactttattgggacccgaatgcatcatatcgaagaaggactttacgcccacagcagcattgcactggaaaggaaaccaaaattacattccagaatatatggaaatatgcataggtaaaggtgtgatattacaatatgaaccaatgaacattaaaaaaaatacctaattgaactttaaaaaccacaagtccatcatcagagattcacttaatgaaatcttcaagctaaaccctaactcacctgagtgtcgttccaccacatgtgcagcctgtagttggccagtatctttccatgctcattaacgtgacccaaggcgagctttacactgggcataacgccccgaccggtgtaggagttttccacgccatccccgtacgggaagaatcccgctatgtagacgtccgatctcttggctgtcctgccacaggcggtgctccaaaggagcaggaacagcaggctggcgaatggaaaccaacttggccggaacatgttgaccgcgtgggctgtaaaacgattctaaatgtgaatagcgcatatcgaggacgtgaacttggagccaagttgtgggtggtgaatggcagtggttggtttcgggtgagccaaggctgccgaggcaaggctgcgcccagtgggtgtgtattattttctacgttctacctgtgtttgctggcactcgcatgcaattttacaggacaggtggagcaaggctaaggccagtccaggccagcaaaattgcttcaaattgctgcagcaatgctggcacgtttagtaattataaagcaatttaatgatctaaaggattcgtgcattatttagtatgctcgttaacgcgaaggagtatcttccaggtgttgcatcctcttaaatcttatgtgtacatgtttttaggaacctaccagcttgcttagtcccagaactggcttttatttcactaccgatgccatttgaaacacttattttacatcaaatctcagccaacgaagaacttttgcagtgcgagggtccgaaaaattatgtatccccctgacttgacatttgtctgacaggaggaattcgaggcaggaagtgcgcatgtccttaaaccgaaagctgtcactgctccgccttggcctaggctttccaacccccgtaattaccataaacccactgcgcttgtaaacatcctgcaacaggtggtcccatcagctggtactccggcaattgttgtgcccgttgccatggactactggggtcgaaaaacgaagtagataactgctcggaaaattaccaaattgaaaattgtgagtaaccataatggaggactatgcgcccagccgctataaaatgcttgagaaaatcggcgaaggcgtccatggctgcgtgtttaaggccatcgatctgcagcgcaacaaggaggtggccatcaagaaggtggcccttaagaacaagttcggaaacatagccctaaatactttgagggaaatcaagaccctgcagctttgcaagtctgaatatgtaggtataccatatatctattttccatttgttaattatgtaactaattgtagattctggacatcattgatatatatcctgacctaactggtctctccttggtgctggaataccagccggacactctgtacaaccgcctcaagagcgaggttaatcccctgagccgccagcaggtgcgtaagtttgcacaccaaatgttcaaggggattgcatatctgcatgaagcgggtctcatgcaccgggatattaaacccgccaatctgcttatcagcgatacagatatgcttaagattgccgatttcggactggcccgtctgtacttccctgaagacgagtcgcgcctttattcgcctcaggtctcaacccggtggtatcgagcgccagagattctatttggcagccagaagtatggaaccggagtggatatgtgggcggcaggttagccatgactctttgatgggtttacatatatccttatggctgacattattgctat

SEQ ID NO: 59 - DNA, 3971 bp, Drosophila
aaaagttcttcgttggctgagatttgatgtaaaataagtgtttcaaatggcatcggtagtgaaataaaagccagttctgggactaagcaagctgcccacgcggtcaacatgttccggccaagttggtttccattcgccagcctgctgttcctgctcctttggagcaccgcctgtggcaggacagccaagagatcggacgtctacatagcgggattcttcccgtacggggatggcgtggaaaactcctacaccggtcggggcgttatgcccagtgtaaagctcgccttgggtcacgttaatgagcatggaaagatactggccaactacaggctgcacatgtggtggaacgacactcagtgcaatgctgctgtgggcgtaaagtccttcttcgatatgatgcattcgggtcccaataaagtgatgctcttcggcgctgcgtgcacccatgtgaccgatcccatagccaaggccagcaagcactggcacctcacccagctcagctacgcggacacccatcccatgttcaccaaggatgcgtttccgaatttctttcgcgtggtaccctcggagaatgcctttaatgcgccgcgactggccttgctgaaggagttcaattggaccagagtgggcactgtctaccagaatgagccacgctattcgctgccccacaatcacatggtggctgacctggatgccatggaggtcgaggtggtggaaacgcagagcttcgtcaacgatgtggctgaatcattgaagaaactgcgcgagaaggacgtgaggatcattctgggcaactttaacgagcactttgcacgcaaggcattctgtgaggcttataaattggatatgtatggcagagcctatcaatggctgatcatggctacctattccacggattggtggaatgtcacgcaggacagcgagtgcagtgtggaggagatcgctacagccttggaaggtgccattctagtggatcttttgcccttgtccaccagtggtgacatcacagtggctggcattactgctgatgagtatcttgtggagtacgacagactgcgaggcactgaatattcccgctttcatggctatacctacgatggtatctgggcagctgccctggccattcagtatgtggccgaaaagcgagaggatctgctaacacattttgattatcgcgtgaaggactgggagagtgtcttccttgaggctctacgtaatacatccttcgagggtgtgacgggacccgtgcgtttctacaacaacgagcgcaaggccaacatcctgatcaatcagtttcagctgggacaaatggaaaagatcggggaataccactcacagaagtcacacttggatttaagcttgggaaaaccagtcaaatgggtggggaaaactcctcccaaggatcgcactttgatctacatcgagcacagtcaggtcaatccaaccatatatattgtatcggctagtgcttcggtcattggagtgattattgccacagtttttctggcctttaacattaagtatcgcaatcaaagatacatcaagatgtccagtccccatttgaacaatctgatcattgtgggctgtatgatgacctatttgagcatcattttcctgggtctcgataccacattaagtagtgtggcagcttttccctatatctgcacagctcgagcctggatcttgatggctggattcagtctcagttttggagccatgttctcgaagacgtggcgggtgcattcgatattcaccgatctgaagctcaataagaaggtgatcaaggactatcaattgtttatggttgtgggcgtgcttttggccattgatatagccattataaccacctggcagattgccgatcccttttaccgcgaaactaaacagttggaacccttgcatcacgagaatattgatgatgtcttggtgatccccgaaaacgagtactgccagtctgagcacatgaccatattcgttagcattatttatgcctacaagggactgttgttggtttttggcgcctttttggcctgggaaactcgacatgtttctataccggctctgaacgattccaagcatattggtttctccgtttataacgtgttcatcacttgtctggccggagcggctatatccctggtgctatcggatcgaaaggatttagtttttgtcttactctcgttttttatcattttttgtacgacagccactttgtgtttggtgttcgtaccgaaattggtggagctgaagcggaatccccagggcgtggtggacaaacgcgttagggccacgttgagacccatgtccaaaaacggacgccgggattcctcggtgtgcgaactggagcaacgattgcgagatgtaaagaacacaaactgccgattccgaaaggcgctgatggagaaggagaacgagctgcaggccttaatccgcaagctgggacccgaggcacgcaaatggatcgatggggtgacctgcacaggtggctccaacgtcggtagcgaactggagcccatactgaacgatgacattgttaggctctcagctccaccggtgcgtcgagagatgcccagcaccacagaagttaccgagatgacgtccgtggatagtgtgacctcgactcatgtggagatggataactcctttgtgtcggtgcagtctacagtgatggcgccatcgcttcctcccaaaaagaaaaagcaatcgattgtagagcaccactcgcatgcccctgctccaactatgatgcagcccatccagcagcaactgcagcagcacttacagcaacatcagcagatgcagcagcagcacctgcagcagcagcaacaccagcagatgcaacagcaacagcagcagcagcagcatcatcatcgccatctggagaagagaaactcggtgtccgctcagaccgatgataatataggcagcatcaccagtacggcgggcaagcggagcggaggagactgctccagcatgcgggagaggcgtcaatcgaccgcctccaggcactacgacagtggcagccagacgcccaccgcccggccaaagtacagcagctcgcaccggaactcctccaccaacatctccacatcgcaatcggagttgagcaacatgtgtccacactcaaagcccagtactccggctgtgattaagactcccactgcctccgaccatcgccgcaccagcatgggctccgctctgaagtccaatttcgtggtttcacagagtgacctctgggacacgcacacgctgtcgcacgccaagcagcgccagtcgccgcggaactacgccagtccgcagcgctgtgcggaacatcatggcggccacgggatgacctatgacccgaacaccacctcgcccatccagcggtccgtctccgagaagaaccgcaacaaacatcggccaaaaccgcaaaagggcaccgtttgccagagcgagacggacagcgaacgggaacgagatccgccgcccaacagtcagccgtgcgtccagccgcgtaaggtcagccggagctctaacatccagcacgccgcccaccaccacagttcgcccaatgtggcgcccgataagcagcggagcaggcagcgcggcaagcaggatagcagcatctacggcgccagcagcgagacggaactgctcgagggcgagacggcaattttgcccatcttccggaaactcctcaccgagaagagtcccaactatcggggccgcagtgccgtgggccagagctgtccgaatatatccatcaaatgcgatatcgtcgagtacttgtaggcggcgcgagtcatatgcattatgccgtagttaaactcctattgttagatccagttgcagtgtaaagattatctttgttttctttggagttacgcatctacatacataccctgtgaagcaggacacacaccatttagtgaactagtagcaatgacatgagatagttgggaaataaattacaatttaaaataatcata

SEQ ID NO: 60 - protein, 1221 aa, Drosophila
MFRPSWFPFASLLFLLLWSTACGRTAKRSDVYIAGFFPYGDGVENSYTGRGVMPSVKLALGHVNEHGKILANYRLHMWWNDTQCNAAVGVKSFFDMMHSGPNKVMLFGAACTHVTDPIAKASKHWHLTQLSYADTHPMFTKDAFPNFFRVVPSENAFNAPRLALLKEFNWTRVGTVYQNEPRYSLPHNHMVADLDAMEVEVVETQSFVNDVAESLKKLREKDVRIILGNFNEHFARKAFCEAYKLDMYGRAYQWLIMATYSTDWWNVTQDSECSVEEIATALEGAILVDLLPLSTSGDITVAGITADEYLVEYDRLRGTEYSRFHGYTYDGIWAAALAIQYVAEKREDLLTHFDYRVKDWESVFLEALRNTSFEGVTGPVRFYNNERKANILINQFQLGQMEKIGEYHSQKSHLDLSLGKPVKWVGKTPPKDRTLIYIEHSQVNPTIYIVSASASVIGVIIATVFLAFNIKYRNQRYIKMSSPHLNNLIIVGCMMTYLSIIFLGLDTTLSSVAAFPYICTARAWILMAGFSLSFGAMFSKTWRVHSIFTDLKLNKKVIKDYQLFMVVGVLLAIDIAIITTWQIADPFYRETKQLEPLHHENIDDVLVIPENEYCQSEHMTIFVSIIYAYKGLLLVFGAFLAWETRHVSIPALNDSKHIGFSVYNVFITCLAGAAISLVLSDRKDLVFVLLSFFIIFCTTATLCLVFVPKLVELKRNPQGVVDKRVRATLRPMSKNGRRDSSVCELEQRLRDVKNTNCRFRKALMEKENELQALIRKLGPEARKWIDGVTCTGGSNVGSELEPILNDDIVRLSAPPVRREMPSTTEVTEMTSVDSVTSTHVEMDNSFVSVQSTVMAPSLPPKKKKQSIVEHHSHAPAPTMMQPIQQQLQQHLQQHQQMQQQHLQQQQHQQMQQQQQQQQHHHRHLEKRNSVSAQTDDNIGSITSTAGKRSGGDCSSMRERRQSTASRHYDSGSQTPTARPKYSSSHRNSSTNISTSQSELSNMCPHSKPSTPAVIKTPTASDHRRTSMGSALKSNFVVSQSDLWDTHTLSHAKQRQSPRNYASPQRCAEHHGGHGMTYDPNTTSPIQRSVSEKNRNKHRPKPQKGTVCQSETDSERERDPPPNSQPCVQPRKVSRSSNIQHAAHHHSSPNVAPDKQRSRQRGKQDSSIYGASSETELLEGETAILPIFRKLLTEKSPNYRGRSAVGQSCPNISIKCDIVEYL

SEQ ID NO: 61 - DNA, 18996 bp, Drosophila
gttccttaaacgtgatcaaaaatataactagagctactactaagcagcgagcacagcgtgcgatatatcaacaagtccagctggcaacatgttgccgcgcctgtggtgagttgtgcctctatgtcctttggcagcatgttgcggtcgcttggcgccggctggtggtcacaaaaagcgccgacgcttgccgtcagtgcttcgcgaagattgcgaggcgcgacacacatcgcggaacccgaactccatacggctgtgccgacactcaatcccgacctaagcccaattttttgttgcgtgaagttgacgaagtgtgttgtactgctgcaagtgcaagtccccgattgctagtgctattccgggatcacaaacgagcatccttcttcggcctcacgattgacgccttctaccactacctgcgccaggcgctgccgctggccaaggaggctgcgatccacctgaatgccagcaacgagatctccgctgtcggtgacggggtcaccatcacagggacacccggtgatcttctcaactacagcgggctggaattggatctcggactggatttggatcttaatctggacatggacctagccactactcccagcagcagcaccttggcgccagctgtaaccgtcaggacaccggggaacaggagcgtggtgagggtcagtgccgatgtgcccatctgggtggtgccgtgctattcggccatccttctgtgcgccgtggtcgggaacctgctggtggtgctaacgctcgtccagaatcgtcgcatgcgcaccatcacgaacgtttttctgctcaacctggccatctcggacatcctgctcggcgtattctgcatgccggtgaccctggtcggcactctgctaaggcatttcatattcggcgagctgctctgcaagctcatccagtttgctcagggtgagtggtggaagccagtaggccagttcatttatgtcttgtccgtgtccaaattaaaaggttatcccaaacttccaactgtgaattccgcatttattagtccctatccccgtgaccgagccccataatcgcttgtcaaatggccacgaaccagcacgacctcgagcggattcgccagcagatcgtgttggccaacattcaggagctgataaagaagatgacacgtcgctgcttcgacgtatgtatcgctatgccggaaatggagttgcgctccacggagcgcgactgcctggccaactgtatggatcgattcatggactcggttcaggtggtgtcgagccagtacttccgtcgccggcgtcgccatcagcaaattcgtttgtcccgttcgaccgcctcctccgcatcaccaccagcatccgcatccgcatccatgcccaaatccgcagcagcaaatgaatctgaatccgcatctagggcctccaatgacgaaaaggtcaaataatggttaagtctagacagatagccacgtgtggagtttattccaagtcgaaaacgaaggctgttccgtcgtagccccagatccccagtgtacttgggtgatggccacttgtccacattggtcatcatcccaaagctttcgaggatgatttcatacttcgagacctttgggaagggcaagaaggggtcgtctagctggaaatgaaagtggattttctgcaggcgtggccatcgatgatttcttgctattggttcttaacaaaatcctagtagagtcttaagtaaatgacgattggcagaaaataaagatgtcgttcagtgtacattcactatgctttgagattctctttaaagtcacccttttgaaatcacttagctaagcttaatattgtataatatacaaagtagtgtagtggggagaagataagttttaaatgaccatactgtatattttagattgtgcgcttgtgcacatcacttttccacttaggaaaactgagtctgccatcgattttacgcacaatttccgcgcttatttatggcctaaatcatatttcgttggcaagaacgcactatatctcgtctcccaatctgcatccgcctgagaatggccgtattttatgatggccgcccgcatttgcgtaacgacagtcagggtttccccgaccagcgagcaccgggttttgggttcctcaagggttcaaaagattaaataggcccacgcacacgacacacacacgcacacacacgcactcgcacactgtaaatatgcgggggaagctctttaaaaccatttcaactcaatgactgtgcccaaaactcatgtttggtccttgaaaagtccagtcagatgggtaaacattctcaccaggcattaatttgtgtctccagctcagataagggttggtgatgtgggtggcgatattcatcagctgagcccggttcagccatctgtgatatggttcgccttcggcgtgattccatgtcccgtcggcggcagtggaacagaatgaagcagaaatgtggccctgacacctgtcacaaatgctaatcggcatttcggtttcaaggagccgagcggcattaatttgcttatttaatcaaagtgcatgccatcggacattctaattattttcataacggtaaggagaggtcctcaacctgtttcacctcctaggactccttggaggcgcatccaaacggatgatgaagctcagtccaggccagtcatcctccattcccgcaagattaatccaggctgatccccatttccaatgcaaattgctcgcctgccgggagctctgcttctgctcagcattctggtcaatttccatatgtacgcagtgtcgatctgggagcctactcacccttctcacccagctcctgttaccctgttccttgctcctttggcgttgtagcactcaagtcgcagcctaagcagtctggaattgcttttaaccgtggcaatattgcgaaaatcactctgctatgcagcgtcacgtcgcgattttcttgtagtgttccgttccgaagcccctttcccccatcagctccatcagctccgctagctgctccacatcctttacgtcccctcgccgatccttctgacacccttccttgcattttcatgacttgtttcctgtttcctgcgtttccgtttcagacgtgctggtgatgttgtttgtcttgctgcaagtttgttttcggtactgccggaaccgctgttctctcctggcctccaacaccacccccccccctatccactgcccccggcatcctgacgtatcctggcgtaccctggcatatccatcttggccgcccccgcactaacttattaacaacataataacaatggctggcaaacaagttgagcgctcaggcacacacatgccaatttgttcagcaagcactcggcgctgtctcgagccccagaaaggcccagaaaaggagctggcattcagtttccaaggattccgcgcccccatcctcatccgcatccgcatccttgttcgcattcccattcctttccatctgttgcacggggcgtcgactcgtgggtcgtaaatctgaaaatgtcatccctggctgggctgaggcaccaatttatggccatcatcacgtcaaggtgcagcgatgtcctgacacgtccttcctggctccctgtcccacctggctccttccggagtgggcgtgaacgcgcccctggatttatgatcgtaattatgcatttgtggccagtggcatttgcattggactcctgccagtggcaaccaatcgccacccactgccattcgatttcatcatcttgcttgcaagagtaatgttggcattgtccattacttatgtaaatcgaaaccgaaggataagctcctgtaagtccatattggttatagtttctgcatattcgatctaccaagaatttcaacgaaattcacaagcgaggcagcaataacaagctcaaagttagtcggattatggggagctactaaaaatacatagttgttgacttttggctcagaattagaggtaataaaacacaaaccgatggtctttttttatggtccttttcttttcgcaagaaattcctcctcgaaaacgaacatcttagcaactaatattagcaactttgtatgttgcccataccaaaaagagtgtgaaaggaatgttttctgtttgatgaacactttaaggctaggacataatctcagataaactgttgtctaattaacttaatttgatatccaattaaagtaactatgtgtgctggtaagacaaagaaaaggtttctttgtggcgcttgaaaaggacatttgtgtgcggaaaagggtcaaattgacatccttagaccaaagtttatggctttgggctttagaattttctctattccactgctcgacctggttgcactttttgtaccccaggcgggacggccttgaaccctgacctgtggatgggccacccattgggcgcgtccaactcgtccaagtcgctgacagctcggcaaattaatgattaattgaattttccttggctctgttttgggtttttttttttttgttgtccattctattatttcttgttttcttggcaacacaaatacaaatcagcgccacacagacgtaatcattaattaggcgcgcagggagctaagtgtctcaagaaatgtgggcgcagtgcaattccagctagtttttcaagggccaaaggcactcgtaatgagcaaatttatgcacaaacacacagtttctacagtttctgatggagcttggcaaacattaaggggccaaatggcataagtagaaaaacgaattgaaataagaactaaccacgatgctctcgtttttcttatttcctatccccccatgtgggcggtacatgttattgacgcccaaagtgccgcccccatagacccatgccaccgtgccacgcgcccactctttttcttttgctggctccaaagtttgaacggcatctgcagagaaacgggcttatttgactgagaaggaggtaggaggtcggcgaaggacgcatttatttgaacttatgtacacaagtgcacatatatacatatatatatatacatacatactgcgctgtgtatgcctgccatattcatgttcatgttgttttcgccttttaatgagagttaactgagcgggggaactggaaactccgcggccaacgatgaatatgaatgcgccactcaacttaatcccactcaatcattatgtggcaatccgcccagttctttttgaccatgggtctgcaattgtcctctcggctcgtactcgtacacaagccccaacattatttgcaccgaacgtatctctgtaccgatctgaattcgtattgcatgtcgaactcgacactttatggtgctccgaaattgttttgtaagcgaaataatggcaagttatgacacccagtgttacacacaattgacatggttattgattttcaattatataaatatttgcaactaaggaaaaaagcctctgctgccactgctgccactgatgtcctgtggaaaaagcatttaaataccgtgttcatcggcaatctgtgtgcgcttctgtgtattttcaatttgcatacacctgcccatgaagaggcgaaagtgatgtgttaaatgaaaatatgctcctaataaacgtttttcatcggtttcccgtataattgttttctggctttcaacactacactgcacgaaatttaaggctaacgcgcgagtggggagcgtgtggcatgaaatcaatttcattcgttggttttaaagccccgtgtcccattgatttcgaggcaaaagcttatatttgtcaagatcataatcaaagctgtcggccattaaataaaatgctcaacgagagaaaagaaacccattaaaaactgagcgaattaaagcgatataaagcaccattttttgcgtgtgagtattatttgcgtggcgaaatgaaatatactcctgagctgaattaatgagacccggtaggcgggttgaagtgggtgggctttgcggacaggcatcttaagggcgcaaggacatcgggaacatggaacacggaacacggaacacggagcatggagcatgggcacaaagggaatacaaatgaaaggtgatttttcagctccctttggccttttgaggatttccatggggaaaccacaaagtgcggttgacagggcctaatgtgaaattaacatggcttatatgcaacgcatactgccctgttgcattcatgtcagccacacacacacacacacacatccatgcacccaaacaccgacagctcaaccgtccatctttgtgtagcgggtcaagttgccatcaagaacacggttgtgccactgcctctgttcatcctgtttaacagcccggtattggatcccgaataccagccaccaccctccgctccctacaacttgccgcaaatttccttggacccaatttattttgcaatttatcgctggataaaaagtgactgcgaaaagcatttcaaagcggaggcgcaggacattgaaaaaacagtgccatgacaacaattacggcgtgtttaagtagcccgtctgggtgaaagtcacgccgtgaactgccactttctccccttcgttggatggcataaaagatagattgtttatagttggtatcaaaaggaaaaaggcctggccaatgtcgcagattgaattgagtgctctggagggaatcggggtcaccaaatgctggcctcagagtccagaacgccagctctaagacttgtattattatggtattaaatggtcagggacaccagagtacaactttaaagtatcttggtataaagtaaagtatgcagttttaatcctaaacttggctcaaatgaccttatattccaccatttttaagtaacagtccagtagatttcaatgcatcacaattagaaatgaattcagccctgaaggctgaaaaataaacccaattaataatttaaagcttcggctgaacgattagcatgcattattaacactcacaaatatatgccataatatgtacttttatgtagagcactctcaaattgtgtcacattcagcacattcctttcagttcgtttaattaaagtgtccaataaattaacgctcgacaagaaggacaaacttaaatgcacttcaaatggcgcagaacccatcaagactttccatcaatttgcaaaagtgttggccaaaagtgaggctccccacctgggaactttgtttccgtgaactttgcaccggcacgcggtgaacgcgaaatgcattattcacttttatgtctttttcctcaactactgtccgggacaaaaaaatcagtttgcaactgaagaatcttacctcgactcgaactccaattgcgatgtccttgttgcccagctctcagctccttgatgatgcagcgcagcggcagttgggctctccgtaaatcgagcgacataaagcggtcacccaacattggccattcgatgggagtgtgacaaagctcccagctaaacttccccggccatgtcatgcatgcgaaatggagttctcgagaagcagctagtgaatctttaatggattcatcgattgcgaagcgaaggaagctgcaaaactttcggtttttaagccacgctcggtttggtagttggacactcgataaatttacccaatcaccagaaaaatatgcaacagcttttgggcttcattctactctagttttccaattaaaatgcaaagttctagagtttccaaaactcaatgctcctggacccccatcctcgccggcgtcgtcatccttgggaatggagatctcactcgatttggccatagagtgtgtaggacattttaatttgttgtgttttacaatttgcccccatacaaattcatgtcgattgaggctttttcgcctgagtccgctcagtttatggcacttttataactcacatgtatatatgtatatatgtatgtacagacaggcgaggacccccggggcggtaaaaagttgctcttttttttcgatggccttaacttggcgtatcaatatgtgggggggaaaacaatgggaagcaattttttcaaataatttcacaggcgaaatcaaaaggaagcagcccgggaagaacaagaacgcgcggcacatcgaccatctgatacctcttgtctatgctggtgcggtgtccattgtgggcgccacaagtggagggtagtgatctgttgataccatcgacattcatccgagaaaaaagcgtatccttgtgccttttcaatctggccatcttgccatccggccatccaagcatcggctgccatcgagcgtcgaaaaggccaaacttttgcacaaccgttttttattgttgactcaaatttggaattatttttatttgagcaccgtggagggacacacgcactgagtccataaaaatccactttcagttatgtggcagtgggtgtaagtggaaatgccgaaagatggacttattgtcattgagtatcatcgcatcgaatggggcgctaaatcaaaaacaacgaccagagggcaatccggaattggattggtttcgaaatctggaattcgcggtggggggaaattgaaaatgggccatattttggcaatcgatttgcatgcgccgcttaaagtcatttccaattcgataatcataatttatgaagctgttttgtattgcaattttcgcatataaattacattaaatatttacgtcagccgtgaaaaatacataaatagtgcgtctctggtgtgtccgccgattccgcgcgagtcctttgtatccgcatatcctgttcaaacaatactgcgctagagtcgaaatccaaatatttgcgcagcaaatgaaaagcatttaaatccggtcgcagaggttaaccgtagtagtttttaagccgcctggctgccgcaaccggcaaacttttcgatccactctcgcgactagcgagcaattagctgcggtcgcatttcattgtgctacccgctatttgcactaaactttacactcattaaacaggcgagaaattattgcagcgaagtgtccgggattaaagtgttgcatccccatcccgctgccagtcggatgatgatgaggcatgatgggtttctgccaggtggtcgcacttttaattggtattcaactttctcctttgaccctcacaactcgaaacatgctcgtaatttaccaaccaaaataagcgagtttcccagttccgttccaacttccttggtcacctcaaaagctgaaggcgagaagcctgttcgctaagctaagccgcactcaaaggttggctctgtgtttgccttacctttgcagttgagatgaagataaacagaaataaatgaaatgttacatttgtgtaccttgaaaatattcagaagccatgtttataaatgaaattatacatttatactatattttaatgcagtgcctgggaaaactctaagacattggtgttgcattaaaaataaagtgcttaaaagtatgcaacacagaattgatagtactgcattagcatgttgattcatctgaatattgagttacataccccacatgttgtacttatcagataattatttgatttacatgcttaaatcatatcagtgctagcttacccagaagccctaaattacttctatcccaagacattctctcagtgtacatgcggtgggtattcccaaaagtttaggaaaattgcccgtggcatttggcttgccagaaacggatgcctgtcgaagtgcagctagttcttttgggcaaaggccagttatacttttgcggttgttagcttaatttaatgtaactttcgacatggtcagatggagtcgaaaggtgagcggtgtatctggagaagatcgaaaagcaaataaccagctggaaaatgtttggccacaaccctctgagaatccacttggccttacgagtggatggatggttgatgggtggaaaccggagcacacgcacagcacaattagcagttatgaaaagttgaaagttcattttgtgcagcaacaaaacgaaaatgtgatgaaaagttcgcactgaccttttggaatttttcattgtgaacgaaggagctggccgaaaatgattttgccaaaaagccgtgggcgacaataaacagatgaagtctgaggcatgtttgcggtccacttaattgcaggccaagaagctcatgaaataccctggtagccacaaactggttgctccatctgcagaccaaacgaaattatgggattcattcgcagagggaatgtgcaacaaagcaactaaaatgtgagattttccatttgaaagcccacactttcgttcgatttgccacaatttgcagcatgtataaagttatatccgtactgccatgatatttctgcatggcagaaccatttcaagtttgtcactcgaacacgcacccaagtgcagaatgccggcatgtgaggatgcgaggatgcgaaaatgccaggacacgcggaggtggccggtggcttttcgatagcggaggatggtcaagccacgaggggcaccgaaacgggaacccggctcattgtcattttccgacccgagttggctttgagcacctgagaaccagtcgacccagtcgacccagtcgacccagtcgaccagtctacctgtctacctgtcgaccaaatgtggacacaggctccattcgagatggctgctcgtcaacagagccatcaaattgtcattttccgaacaaacgcgttggttttcactcgaaattggccgaaaaataaatgtccttgtaaatcactcgacttttatctttaaaatatgatttaaattcagcgaataaaatacccaatagctgataatttatgcccaatttattatgaattaaaaaaaaaaaaaagatatgaagatttgatattaaaatgcccaaaaataccatatatattaccaattttattgattaacatttgctcatttcagtcataaacaaatcctttgataaagccaataaaataatattttaaaaaattttaaaccaaacccaaatcataatattaatcttatgcacaccaaactaaatgttgaattggcaagacgagaatgctaatagtacataaatcacaacttatcactttgggaaacaaccattaaaaatgctatttaaaagcagacaaacagcgtaggatggctggtacatttttactgggattttgctctcctttggcaatctgtcatgtttttgaagtaggtcctcgtcctcgacagcatcgtctgccagataagaaatgcatatttaataattttattctttcactcagcaggggccctaggagcttagcttgttttatgactgcgacaaagtaatcctgtgcaaaaggtaggaagtgggaaatcactggttccaaaggggcagattatcagggatacaacagagatgtgctcgacttagctggcattatgagaagctcgtgtggaaaaattggccccaaccaacacacaacacaaaaatgggcgaagccaaagttctcgatgtcgatgttgtttcccttcaatcagcgattcaatttacgagtgccaaaattcgacacagttttccccttagccattttgccacttgccacttgccacttttcactgccggctgacacgccccatccggaatgccgcgaaaatgggcgtgcgaatattttgcctttcgctgaattcattgttggcccatggcccacgttgcggtccggtttctattttcagtatatccataaaattaacatttttgttgcggactctcaaaatcactgagctatggtcctcgtggtcctccagtttgcatttcccagcgaaaagggaaaggggcaagaggtaaagtggcaacggggtagagggtgcgtatatggcggcgccacgcgacggagctaaatttaattttgttaatgagctcggcccctttccgtttcatcatcccgccaatgggggcagccagccagccagccagcatggcgcagccacactctgccgtcctattattttgcattcgcaattctaaaagcctcaacccgtttgtgaggtggtccgtggttccagaatccacttgccaagtggagcgagtgtgtgtgcgtgtgttttggcctttattgcgctcttggtgcccgccaggattagactgtggataggcatcgggattgggattgggttggggatggggaatggggaatgggaatgggaataggggattgccattgggatggcgattagaacgacaatggaccattgccggaaacacttgaaaactgtttcgtgttggctggggactttgattaaaagcggcaccattgctatcatagcggcaagccgaaaagcagaaaacaaaaacaaaacaaaaaaaatgagggaaaataaacaagttggatctgacaaagacattaacattttaattgttccggcaacgcaatggagtcgtggaccaagcgtaacaattgccaatgagtgagctcgaataaaagtttatggggtggaggcgaagggcagtcgggaaaatggccattaatattggagccataaaagtcaaaacttttcgacgggtggcaaatgggaggcgtggattagcaatatatcccatgccgccaggaaattgaccctagtcattatttgccacagagatgattatgttaggcaataaacaaacttaagttttgaatctgctcgatttgtgaatgaaaacgccaaaaatatacatatataatctaatgtaaatattttagttatggattttgaatggcttggatttttgtattggttggtaacttctctgtttttccaattcattgcagctgcctcggtggccgtttcctcctggacactggtggccatctcttgcgagcgctactacgccatttgccacccgctgaggtcgcgcacctggcagacgatcaaccacgccaacaagatcatcgccatcatctggctgggcagtctggtgtgcatgacgcccatcgccgcctttagccagctgatgccgaccagccgaccaggtgagtgtgcgccaggataacactaattcaggaactaaccccctgtctggtcaggacttcgcaagtgccgcgagcagtggccggcggatagcctcaactacgagcgggcatacaacctgttcctggacctggccctgctggtccttcctctgctggctctgagcttcacctatctttttatcacccgcaccctgtacgtgagcatgcgcaacgagcgagccatgaactttggcagcagtgggccggaggtcaccacctcctcctctgccgctgtcgcagaagccggtagccagcgacgcgccaacggaagccattgtcagtccctcgacacgattgtgccacaccagcacaatcctcaccagcagcaccaccaccattcccagtactactatggtaaggggtttatgcttattttttgagatattcgtagattttttttgtcagccagctgggtcaaagggaattctgggttcagagggttcagtggcgtagcattaatagttgcgactgttgccgggggttggcagggggcgtcattcgggattagctcaactactgagcttatccgcggacccaaagcccccgaactgcgtcacacacaatttgcacggcaaagtttcccacgcacgaaaagattcgtgtgtctacgactcctgcctaaatcgcggaagtgaattgaatggctggctgggggatggggaaagggggctaaagcctggaggagcactctgtccaagtttttcaagcgtgtgtacgaagagacaatagcaagcgaaagctctcccggcgtttttactttcatttgcattcgcatcgccggctttaagagcaccacccatggctagatggccccttctcccatctacggcgtcctccatcctctccagctgcggatgctgtgaataatccccagattatgggcacaaaaattctaggcagcccaaggcaaagccggcgcaaatcaattctgctaattcgcctttaatgccgccttaaagcgtgctcccaatatatacatatctctatgtaaatttagaatatattgtagtatatgctcgtctgcagcagacatgcttgactgtaaatatagaacagtcccagtggagaggcctgctgaagaggaacctcctcggtgctccaccatggatgcgagttgataacgtgacgtgtatgataaatgcacacccacaaagcgaagtcaaccgtagagtccccgtggaaatcacagtgagcctaccgagcagcgaacttactttaatcttcgagaatattactctgcctctggtccaattaatgttgagaagaggagctcctgccacggaaagatggaagcactgaggcaatggagcagtggagcagtggagcagtgagtccctgggcgactcatttgcatgaaagggttggcgcctccaggtggtaagtcctttatgcgaaatggaaagtgtgcattagcaccttcacttgcgccgcactgaattatcgcagcactcgagaattcatcgagcgattcatttcctaggcaactgaccccgcttgacccatggaccaacacggacatgccagtccacccgctgctgaaaaaggtcaatttaaatgccgtaaattatgcacgagacgagcatttaagcgctcgttaaaggccgttatcccattgccaggattctccactggagcccgtcggacgcgtggcactcattttcacacatactcgcactccggtcgcctttctgtgtgacaataaatttgattaaatttttaactttttcgttccgtttaaggccatctcgtttgacataaccccgtcataaatttccaagccaaagagcatttatgtgtgttggctggatcgcaaatgtcccatcgccgaacaagctgaacattttcatggaaattgccatattattagcagcttcacatggcccccactattcgtgccaagaatccgcatgctatccatccccaaactgcgcgcttgatggcaatttaaattatgctcagctgaactactcgcccaaccgcaaacggcaataaaattgcgaggtatatggtctcattccgcacttaagtatccatttcccccttacatgtatcccaaatgattcccatcacatgctggtagctacaaatatagtatcctttccatgtaacatctacaatgtagcacaaattttgtgatatatggatataatcccttcattgcatcattaatatctacgtgtccttctcttgaaactcagccaaatgccattcctgctggcggtgaggaaggtgagcggagacacctccaccctgcactgatcctcatccgccagctggacgcagtggtcctgcagtagtgtggtcagtgcagccttcgtctggagcaggccaagtcgcattcccggacacattcgtggtccagctccgaagcccagaaaccgacagcccattggtggctgatttagaaagcgttctggacgaaactggttgggtgccggatacaatgcgggatctctgaaatcgaaaaagactgtagttcgtagacaatctgaagtctcactgaagtgtcactcacaaatgaatggcctgaaccggcaacaccagcacggtgcccaaatgcaccttaagttcgctgctcgctcctgatttctgatcaggaagggtgaatgtcttggtgcagcgcttctgcagagcctgcatggccggatgaagacgcagtgcctccaagagcgcagcttcgctatagcgaagttcacccagagccactggatcaatcagattgccagcgtggcgctgggccacttcatccaattcgatgtgtaaccgtcgctgtgcatcctcattgagggccaattcgtagagggcgaaggcgagtagcatcgccgaggtttcgtagccctccagtaggagagtggtggcatgtccagctagctcctcctttcccaagcctcttttgctttccgccagccattgcaagaggttgtcgccaccacttcgggcttccaccaattccctgaaccagtgctgcaggggcaggggtacgtatctgtataagtggatagtggatcaaaggttacacattggcgagttccacattaccaaccggtggccaatgagtctacccaatcgaggcgtgtgcaacagtgacatggtctccagcaaactccaaacgcttggctgaaagagcggagcgagccattccagccagcgacttggttcatgagccaccctcatgtgaatccccaggcaatgtgcatccagaccgaagatcgcggaggcaaccacttgtagcgtataacgcgtggccaagtccttggcctcgaagcgtccaaggggcacctgatcccggagcaactgacatgctctggccacatgcggcaaggtctgacgcactcggctgggtgtgaagagcggcaccaggtcggcccgcaagactcgccagcggtctccgttggcgatgaagggattgtggctagccaggacatcgcgctggtggtccacataaacggcgttgtccgcacagtcggcaaagttacggcccaccaggatctggcgcagcaactcctggtcacgcaccagaatggcgggttcgttaaacaggcgatagaaacccacatatttcaggcccggattccgactgtcaagaaaagttcattgcacgtggccttgaaggactcttaagattagtgtatcttacgtatagatttcctggtaaatctctccatatgagcggcggcccagggcaaagtccaacatattcccaaccaatggccagccaaaaggtgcctccagtcccaggcgacgccagtgattgccctgccatttccaaaacaggagcgtggcggccaataggataaatagcaccagtggcagcattatcgatgagcatctgaaaagcttgaaaggcacaatcccactcaacttgcattcccagttgagttgaatatctcaaagcagctgagagtgaaccacgttgcgtgattccatgattgcgcctcattagccacgtaattgctgtatatcaatcaactgacgggtatgtttcaatcacgcaagattcgagacagctagcattgggctttgaattaatttctataaccactatgactcaatatgttttcggataataatcttagtatttcaacttatatgcattgtacacatccattcagttttaatttatttagtgcatttcttctgttcaaaattttgttttttttttctgtgcttaacattcaatttgacaatcgtatccatttgcgagtcaaatcagatgtgttttgtggataccctgtaactttccatcttgcagattacggccactgtggcagcaagcggcgattgatcagcggaggaggaccctgcgaaggaaggaggcatctatactgcatgcggagcgcatccgtgaagtccctgcgccatcagcagatcaacggaggaggtggaaccctaagtggaactggagctggaaatggcgagtgctgcagccgggtgcacaggatgcgccaacagatgcagctgcagcagcaaggctacgtgagcgacaatgaatcccggcgcaagtcattgtcgcagcccagtctgcgtatcacggaagcgggactgcggaggtgagtgcttcagggtattctcatccacatatgaccgaccgattcgtgtgtcgattttcgctttcacggtaccttgcagatccaacgaaaccaagagtctggagagcaagaagcgtgtggtcaagatgctgttcgtcctagtgctggagttcttcatctgctggacgccgctgtatgtgatcaacacgatgaccatgctccttgggccgacggtgtacgagtacgtgggctatacctccatcagtttcctccagctgctggcctactcatccagctgctgcaatccgatcacctactgcttcatgaacgccagcttccggcgcgccttcgtggacacctttaaggggatgcgggtgtgcgagcgcctgtgcgctccctgctgcttctggcggcgacgctccaagaacgagacgaatctttcggtggccggtaactccattgcgctggccaactcggtcatgtccagccacacgatcctcgagagtccgcgactctgagccagccgccgccgacggcagatggccgagtcggagtcactttaggttagcaatgggtacggatcgggagcgctaatatgtgatgatgcaatgtaactgcaatagaaactgtggttgtcaacgacattccgccgcgttctgaatgtgtgtggaagtggccagatggataggtgggtggatggaggaggtgccatggcaattgcccctccaaattgctcttcatcttaccgataagtattttaatatatgcgtatgtgtgtatgcttagagttgcgctaaagcgctttattccgtgtgtgttattcgactttgacctcgcgttccatgtgtttacaccttaaggtgggtgcaaccagtcatgccaatctaaattgagatcgccacacgctatggggaatggaaagtgctcagctggattaagatttttaaacaaacaataggctaagaaatcagcacaatggtttcacgacatggtcacagtatgtcgtgagccaacaaaatgacttccaaatggggggcgctccataaaattgttttaatttatggaaaatggtatatgtgttggaaggatttgttggttcaaatctggagttgggtcaaaagttggtaaacaactcatttgtcacacatgtcgtatgagtgatatttacgcaagctatccgaccattgtgctgcactttctaattttatttccacactttacgttccaaagatcaatcccaaaagtaaaaggtattctgatcacggtgcagtgaaaggtttcaatgaatcaagaagcatttgacagcaagctgattttacagggtacacagggaagtcccactctcaaaaggattcccatcattcaaaaatggttgtcagacggagcttatggagtggcagacactccgaggtccaaaactaaattaagaaacccaatcgggtgccaaaatccaattttaagtagacgaaagtagctggaaatgccaatcggatatattcgggcgggattagcattgtg

SEQ ID NO: 62 - DNA, 2250 bp, Drosophila
atgttgccgcgcctgtgcgccgacgcttgccgtcagtgcttcgcgaagattgcgaggcgcgacacacatcgcggaacccgaactccatacggctgtgccgacactcaatcccgacctaagcccaattttttgttgcgtgaagttgacgaagtgtgttgtactgctgcaagtgcaagtccccgattgctagtgctattccgggatcacaaacgagcatccttcttcggcctcacgattgacgccttctaccactacctgcgccaggcgctgccgctggccaaggaggctgcgatccacctgaatgccagcaacgagatctccgctgtcggtgacggggtcaccatcacagggacacccggtgatcttctcaactacagcgggctggaattggatctcggactggatttggatcttaatctggacatggacctagccactactcccagcagcagcaccttggcgccagctgtaaccgtcaggacaccggggaacaggagcgtggtgagggtcagtgccgatgtgcccatctgggtggtgccgtgctattcggccatccttctgtgcgccgtggtcgggaacctgctggtggtgctaacgctcgtccagaatcgtcgcatgcgcaccatcacgaacgtttttctgctcaacctggccatctcggacatcctgctcggcgtattctgcatgccggtgaccctggtcggcactctgctaaggcatttcatattcggcgagctgctctgcaagctcatccagtttgctcaggtccctatccccgtgaccgagccccataatcgcttgtcaaatggccacgaaccagcacgacctcgagcggattcgccagcagatcgtgttggccaacattcaggagctgataaagaagatgacacgtcgctgcttcgacgtatgtatcgctatgccggaaatggagttgcgctccacggagcgcgactgcctggccaactgtatggatcgattcatggactcggttcagctgcctcggtggccgtttcctcctggacactggtggccatctcttgcgagcgctactacgccatttgccacccgctgaggtcgcgcacctggcagacgatcaaccacgccaacaagatcatcgccatcatctggctgggcagtctggtgtgcatgacgcccatcgccgcctttagccagctgatgccgaccagccgaccaggacttcgcaagtgccgcgagcagtggccggcggatagcctcaactacgagcgggcatacaacctgttcctggacctggccctgctggtccttcctctgctggctctgagcttcacctatctttttatcacccgcaccctgtacgtgagcatgcgcaacgagcgagccatgaactttggcagcagtgggccggaggtcaccacctcctcctctgccgctgtcgcagaagccggtagccagcgacgcgccaacggaagccattgtcagtccctcgacacgattgtgccacaccagcacaatcctcaccagcagcaccaccaccattcccagtactactatgattacggccactgtggcagcaagcggcgattgatcagcggaggaggaccctgcgaaggaaggaggcatctatactgcatgcggagcgcatccgtgaagtccctgcgccatcagcagatcaacggaggaggtggaaccctaagtggaactggagctggaaatggcgagtgctgcagccgggtgcacaggatgcgccaacagatgcagctgcagcagcaaggctacgtgagcgacaatgaatcccggcgcaagtcattgtcgcagcccagtctgcgtatcacggaagcgggactgcggagatccaacgaaaccaagagtctggagagcaagaagcgtgtggtcaagatgctgttcgtcctagtgctggagttcttcatctgctggacgccgctgtatgtgatcaacacgatgaccatgctccttgggccgacggtgtacgagtacgtgggctatacctccatcagtttcctccagctgctggcctactcatccagctgctgcaatccgatcacctactgcttcatgaacgccagcttccggcgcgccttcgtggacacctttaaggggatgcgggtgtgcgagcgcctgtgcgctccctgctgcttctggcggcgacgctccaagaacgagacgaatctttcggtggccggtaactccattgcgctggccaactcggtcatgtccagccacacgatcctcgagagtccgcgactctga

SEQ ID NO: 63 - protein, 749 aa, Drosophila
MLPRLCADACRQCFAKIARRDTHRGTRTPYGCADTQSRPKPNFLLREVDEVCCTAASASPRLLVLFRDHKRASFFGLTIDAFYHYLRQALPLAKEAAIHLNASNEISAVGDGVTITGTPGDLLNYSGLELDLGLDLDLNLDMDLATTPSSSTLAPAVTVRTPGNRSVVRVSADVPIWVVPCYSAILLCAVVGNLLVVLTLVQNRRMRTITNVFLLNLAISDILLGVFCMPVTLVGTLLRHFIFGELLCKLIQFAQVPIPVTEPHNRLSNGHEPARPRADSPADRVGQHSGADKEDDTSLLRRMYRYAGNGVALHGARLPGQLYGSIHGLGSAASVAVSSWTLVAISCERYYAICHPLRSRTWQTINHANKIIAIIWLGSLVCMTPIAAFSQLMPTSRPGLRKCREQWPADSLNYERAYNLFLDLALLVLPLLALSFTYLFITRTLYVSMRNERAMNFGSSGPEVTTSSSAAVAEAGSQRRANGSHCQSLDTIVPHQHNPHQQHHHHSQYYYDYGHCGSKRRLISGGGPCEGRRHLYCMRSASVKSLRHQQINGGGGTLSGTGAGNGECCSRVHRMRQQMQLQQQGYVSDNESRRKSLSQPSLRITEAGLRRSNETKSLESKKRVVKMLFVLVLEFFICWTPLYVINTMTMLLGPTVYEYVGYTSISFLQLLAYSSSCCNPITYCFMNASFRRAFVDTFKGMRVCERLCAPCCFWRRRSKNETNLSVAGNSIALANSVMSSHTILESPRL

SEQ ID NO: 64 - DNA, 4289 bp, Drosophila
agctgtaaagtactactactacatatgtgtacattcaagtttcgcttacgaatgcaacgttccattaaagaagccaccaactttaagatacacgcatataacaactcctgagaattgtgaaaactgatctactttgatgatcaactttcattgctgctgattgaataattgagtaatgagtaattggtatgctgataaacaggaaaaccaaaatgtcaacagttgataaggaacattaaaacacaaattaagaggacggtaagtccttcactcggaccttttcagctgagcaccgtaaagtgctgaagggattgcccccacacccagaccgcgcccacttccacttccactttaaaataatcatcatggccctcttttttggccaggctgcggtggctttgggccttaattgtcgactcagttgctgtgctgtgctgtgtactcgacaaggcgacgaaccgagagccttgcagctccataatgacaggcggatggactcgaacactcggacccggacccggacccgaacccggacccagtccacagccaggacataagcggcttgtgctccactcaactgtcgcctttcggagctgctcctagcttgcaattaaaatacccacttgggccctataaattgtgaacgtaggaaggcaggcggaaaaaaaaaaaaatattccagcactttggtgtatggagtggggtccacttaattcccaggtactcacccaaaaggattccaactataaagacatacagcgagagtgcttaagttttactctgtttatttgcagcaaccttaggaagttcaattgaaacaccaatagactagcgtctgagttattttacgagtacgatcataatcacaagtaggtaaaaaaaatccatattcgccttacttaaaacaaaaaaaaaaaccacacgcagatcgcttatcatacatatttacaccgcatctcgttgatcctgaatgggtccttggaggcgaatcctctacagcttagagctgaggactgttgacggcggcggcggcactattggtggtcaccaccgcattgagaaactcgtggcgtgagcgactccgccaggtgcccatacccatggctaggccgggattgagactaatgttggtgttggcactcgcataggcgcccgggcctgcgcccgcctggctggcggagagtcctccaccagcagcaccaccgacgcctccgctggcacctgctccacgacgccagggcagacccttgaaggtgtcgacaaaggcgcgccggaagctggcgttcatgaagcagtaggtgatcggattgcagcagctggatgagtaggccagcagctggaggaaactgatggccgtgtagtcgacatactcgtacaccaccggtccgatcagcatgaccatcgtgttgatcacgtacagcggagtccagcagatgaaaaactccagcaccaggacgaacagcatcttgaccacacgcttcttgctctccagggtcttggcctcgttggacctggatagtggattgtggattgtggagaaatgggaatagggaataggattggcagaccggttatcggacacgaatcctacctgcgaagtgccgcatcgtggacgcgaatgctgggcgaggaggtcttggccagcgtcaccgtggtcgtcgtggtggtggtgatcacagttggagccgttggtctcgttgtcaaggtggtcgttgccatattggttgatcctccgcctgcggatccctctgaatttccattattattgttactattttctatgtgaaaaaaaaaaaacatgtgaacacaagccaaatataatcaaacaaattaacgttattagcagcaacaaataaaacagttgccataactaatctaaactaatacatagacgtaaaataattaaattttcaatttggttttaagagtctcaaaaataatatagcatattatgttaagtggatttgtaccttcttatcgagcatttcaccaacaatctatatctttaaagtattatgccatattacatgtcatgtaacattaaataacttatgagttatgatatttagatgcaaaataatacttgaatgcattcataaatgctcttaaagttgtttgcatattcatggcttttaaggattgaaaaaggattagtttcgtgcagttaccaaccattatagactgcggtggcggtcaggaccaggatgcagttactactgctgctggtgcccggattcggtgcgcttccgccggccgttgtagcggaaacaggcagcgattgctgcaggatgcgtccgctgtccttggccatgcctacgtacagggtacgcgtgatgaggatgtaggccacgcagaggacgagaagcggcaggacgagcagcaggaagtccagcaggatgttgtagaagagctcgtatccctggtcgggccaaaactcacggcacttgcagtagcctgtaacgtaagttggtataacaaccagacggtgtctgctggccaggttgctatgcactcacccggtcgactggtgggtatcaattgactaaagaccgctatgggcgtcatgcagaggatgccgcccagccagatgaagccgatgatcttgtaggcgtgactgattgtctgccaggatcgcgagcgcagtggatggcatatcgcgtagtagcgctcacaggatatggccaccaaggtccaggacgaaacggccacggaggcggctgaaataaataaatgaaagcggattaacttacaacaaaccgaacacaatggacacacccagcagctcctgtcgagcgccgtgtcaaatcgctttcattagaaggtccttcgcccgcgttcgttgcattttaattacacaatttgcatattgggaccagacgaaccgtaccaaccagacggacggagacatcgctcttcgcacttctgcctgttcttgtagtatgacaaacacgatgcacgatgcaatttgcagaaagtgcaattaagcaattccccagccactccttttcttgttgcccggtctccttttcatgtaagcctgttagatgatttcccattgtaaagcaatttgtacccacaccctgcccatccctcatattcttttgggctaccactatcgatggggctacacaagtgcaagtcaatagggtggactgctgtaggtgaaaaactcgacaccgaaagaaaaagacccgattcgaaaaattggtcaattttagcgcaattaaatgagaaataatttctagtttttcaatcgattgttttatagcaccaaatcatatatcttaaccgtaaaggcatcaaataaatatgataaactgatcaaatgaaagcataatttgcttgtatgtatgcgtgtttttggaatttatagcttaccaaaacacttgtgaaatttgcaaatatacatatttgttcatacacaatttagacttcaatgcaataagctgtaaggtctatggtttcaattattaatactcggaaattgttgtgctagcagatacatttgtggtttgttagatatacatatttgcttataaagatatatatgtatgtacgtattgcattcaaaagcaataagcagtaaggtaaattggatcaagggacgagtatttaagacagcctgtatatgttccctttactttaatgcgacacctcattcaggcaattaaggtccaccctaatgtgcttatcccttcagccatctgcagctgcattgtattatattggaatggtattttctcgcaaaatgatatgcaagttttagattgatacgtacaattgcagtgattactactttagttacgaatgatgataggtgatgtagtagatatatatttgctaccaaagatagttacaccttagaatcctaaaagaaataagtgttttgtagtcgcagttcgtttctctagttcaacacatccagccaaccaaggtccaccctaatgtgactgcacttcagctgcactgtattatattacattttagctgcacaattgtttactttctattttaattatgcatgcaaactaatatgagcagtaaagatggattacctccacctgttccgttggagtgcatcccgtccaggcaaccaaggtccaccctaatggggtagcccttgcccttccaactgcattgtcacattggtctcgccctctgtcgcgtttgttgagttaaacccctgaaattgaagtttacttttgattgacggcggtgtgtgatgctctaagccagaaatgctagcatgtgtgcgcttaaacttaaaacaaacagcagcatggcatttc

SEQ ID NO: 65 - DNA, 1248 bp, Drosophila
atgcactccaacggaacaggtggagccgcctccgtggccgtttcgtcctggaccttggtggccatatcctgtgagcgctactacgcgatatgccatccactgcgctcgcgatcctggcagacaatcagtcacgcctacaagatcatcggcttcatctggctgggcggcatcctctgcatgacgcccatagcggtctttagtcaattgatacccaccagtcgaccgggctactgcaagtgccgtgagttttggcccgaccagggatacgagctcttctacaacatcctgctggacttcctgctgctcgtcctgccgcttctcgtcctctgcgtggcctacatcctcatcacgcgtaccctgtacgtaggcatggccaaggacagcggacgcatcctgcagcaatcgctgcctgtttccgctacaacggccggcggaagcgcaccgaatccgggcaccagcagcagtagtaactgcatcctggtcctgaccgccaccgcagtctataatggttggcggaggatcaaccaatatggcaacgaccaccttgacaacgagaccaacggctccaactgtgatcaccaccaccacgacgaccacggtgacgctggccaagacctcctcgcccagcattcgcgtccacgatgcggcacttcgcaggtaggattcgtgtccgataaccggtctgccaatcctattccctattcccatttctccacaatccacaatccactatccaggtccaacgaggccaagaccctggagagcaagaagcgtgtggtcaagatgctgttcgtcctggtgctggagtttttcatctgctggactccgctgtacgtgatcaacacgatggtcatgctgatcggaccggtggtgtacgagtatgtcgactacacggccatcagtttcctccagctgctggcctactcatccagctgctgcaatccgatcacctactgcttcatgaacgccagcttccggcgcgcctttgtcgacaccttcaagggtctgccctggcgtcgtggagcaggtgccagcggaggcgtcggtggtgctgctggtggaggactctccgccagccaggcgggcgcaggcccgggcgcctatgcgagtgccaacaccaacattagtctcaatcccggcctagccatgggtatgggcacctggcggagtcgctcacgccacgagtttctcaatgcggtggtgaccaccaatagtgccgccgccgccgtcaacagtcctcagctctaa

SEQ ID NO: 66 - protein, 415 aa, Drosophila
MHSNGTGGAASVAVSSWTLVAISCERYYAICHPLRSRSWQTISHAYKIIGFIWLGGILCMTPIAVFSQLIPTSRPGYCKCREFWPDQGYELFYNILLDFLLLVLPLLVLCVAYILITRTLYVGMAKDSGRILQQSLPVSATTAGGSAPNPGTSSSSNCILVLTATAVYNGWRRINQYGNDHLDNETNGSNCDHHHHDDHGDAGQDLLAQHSRPRCGTSQVGFVSDNRSANPIPYSHFSTIHNPLSRSNEAKTLESKKRVVKMLFVLVLEFFICWTPLYVINTMVMLIGPVVYEYVDYTAISFLQLLAYSSSCCNPITYCFMNASFRRAFVDTFKGLPWRRGAGASGGVGGAAGGGLSASQAGAGPGAYASANTNISLNPGLAMGMGTWRSRSRHEFLNAVVTTNSAAAAVNSPQL

SEQ ID NO: 67 - DNA, 9249 bp, Drosophila
caaaataaatgtatataatttcaaaattgacatttgctaatgataagcctctgcctcatgcccatgcttatgctgaaatatggacaaaattcgggcacagagcaagagatgcgcagagcagctgccatccggaatggaatgagttggaatttgggcagcagatggcgctgtcgcaaaaggaaggaagctaaatttcactgggccccaaccaaacggaaatttccacccacggctcagaaattgaagctgtttatggtaaattaaaccaattgagtgggattacgttttgcgcactacaacaacgccaccaacctccgcatcaactccgcaatctccgacaccccgaagtgtttccaactgggtttcaatttcactgtctggacgagcctgcggctaacgaaatttatatacccatacaatgccatcaaagccacaaggtgtttatgggcttaactccggccctgattccgcctacttggctgcctcgcctcacagatttggatttgcatgtgccacgatttggggcatgcggctgagaaggcggctgagcaggcggatagaagacaaatagccagcacgttgcggttcatttggctgtcacaacaaatgccgaattgatgcaaatgtaaatggattcgatatccaggaacgcgtcgtcggaatcccaagcagcagtcaagtgatgaatacacggcttaaaagatactgtattaacttacagtagcttaccttcaaagcaaaaattgtagatttcattctctagtaacgagttcatatccatacctctttaatattggatactatttattacccagtttattacttagtttttatttcagaatcaaaaacaaatataagcaagcttaccccatttaagtacttggcaattgcaaatgtgcacataccactttcttttccatccacaaactggctttcaaactgctgttggccaactcataaatatggcagacaataaatctagattctttttcaattgcagggtttggcaaacgattggcaataataggagtcatcaaaacgagagcaaatgtcatacagcatgtcgtccttattccgtggcgttagtgcgacatttggagttggaaactaggagcccacttagactaacaacgcccgtgaccattaccatgacgctactgcagaggcttcaggccatgtcggccaccacgaccaggacaatactggagggcagcatcagcagttttggtggcgggacaaatgagcctctggcgagcaaaatacccgttctggaggagtcagcctcacatgccagatatttgaaattcattgccgacgggctcatcgacgagggactgggcagtgcggtgggcagtgggagcagcatcgccgtatccgttgaagacgtggtcgccggacaggcgcaggacatccaggcgagcgaaggatccaccgacgacgccgacggcagtagccatttggcattagtcttcgtcaagtgtttcattattggtttcatcatactggccgccatcctgggcaacatgctggtgattgtgtcggtcatgcggcaccggaaattgcggtgagtccttgccattgtgcgttctagccatatccgttggtcaggacatgtgtgtcctcaaatgtctgggtttcattaatttgtcgccatgaatcaggtggcttttttccctttttgcgccatggtttcaatttcattgtgtgcatttggcaggaagcttccaactataagttacttagataataatttaacaaagcatgaacttcaacatcaaaacattagtgagcaaatattaaaagagcccttactttcgcttttgtttaaggtaaattgcccgagctgtaacctgccacattgtccacgaatcgtgggtgttttagctgtcaaggacatgacttgtacaccccaccccccccgcccctttttccttttatttctttgtttgctcctttttgccgaacgattttgtgcgatttgaccgcgttcggcttaacgagtagctacctcctttttttgcggccattaatttgtcatcatttatcatattttccatcatttttgcgtgtcaagcgcacagaactcatctcgttcgcccaccgaacacttcagaggggggcgtggttggttgactaagttaaatgctagatacgtgcgtaattacattagaaatgttaataaggggcgagcataaaaatattgttgcctacttacgggggcgccattggcatttactttatgtgcggccatataatttgtcaaatttatgaattgggcgccaccttcacatgagatatggccacgtgggcgtttgagggatttccaggtatccaggtagcaaagtacgtacgtgtttcagtcgcaaattcaaaagcccaacaccgctggcatttaaagaacccaacataaaacacttggagagaggcgacaatggtgtaacctaaccccgggacattcaatgtcaaggcgcagactattaaagcagccccgggaaaacgtcttccactgtcattgccgtattcctttcgccttggaaccaaccaacgcacacctgacatttgtggctgccaccgagaatgaggatgggcatggtgatgagcatgggggatgaggctcatttagcctgccagggacaggcaatttgggacctgaccctgactactacgtgtatgccatgttgccgtttttatctcaactgccttgcgccagcatctctttcattattgttgggctcattgtcatgtgcgttttccgcaccattttcaccttttccgcctcgctaggcagtttaaatcatcacggcaaattagacttaattacgaaacaacatgcattcccacttaggtcccatgctacctaaaaaccttgtgaccaagcggagtagcaggtatctatttcaatgttctggataagccatctgggcgacagttgtgcgactttttcacgactggccactcaacttacattattcatgtcacacgcatcgataaagtgggtgacaaattaaagtcagactgcagatcaagtacgaggaagagccgggaaagtgtttcctcacttttcctattaattagagctttccacgttggctgcctgccgaaagtgtcgactcataattgtaatcaaacttgacacccaacaagtttcctcctttcattcccgagcacccactatataatcggcttttgggtaacgcctcaataacattttcgtgttgcctctgatgcgggtgttttgcctttgtactttttgggcgctttaagcttgctccaaaaatgtagacctttcggggcgtcagtttgtggccgtaattaggtttgcgggagatggtttaatgtcccagtgaaatatggcaaaatggcgagcgattgttaacgagtttaatagataaaggtcggatacacataaaaagaatatccatgattgatgcagtttaagaagttcccatccaaagttccttcattcaaaagtttatctggcacattaatccgtttagacggaaagcaaaactttcatttgcgatgttgtggtacgaagagtcaagttcccgcagatgttatggttttaaacatgaattccaaccgcccattcggttgcggttatatccgtggaatggcgttatgtacgcctgattgtttggaaatcagtgcggacggccgataaacgcatttgctgctccacatagcgtatacgccgcgtgcacctaattgacttaacgttttgcggtgccacgcaacgttgatgatcgctggtggaagttgcggtggcgttaagctaattattaattaacccattaaacaatgaaatccactcagagaagcgccttttcgtacatgaaacggcggtcacacgcggcgtatgcgcaatgtgcgcaccaaagtttccaactcaagttggacagcaatccgaagtaacgattagcgctgcgagctctgagtgacttgaaagcttaatgcacaaatttaatttgagaacttggcactctcaataccactggcactcaggctttaggttcattctgccatttttggttgactgtgtggcttccgccttggttcctgctaagttttaacctagcatttactcctcctccttgcagcatcattaccaactactttgtggtctctctggccgtcgccgacatgctggtggccctctgtgcgatgacatttaatgcttccgtcatgatctcgggcaagtggatgtttggttccgtgatgtgcgacatgtggaacagcttcgacgtctacttctccaccgccagcatcatgcacctctgttgcatatcggtcgacaggtgagtcccgggtttactttgtcattgtggaataattgaagttccgagtgctactgggatgtcttttataccttcctttaaatgcccatcaaattgaatagttgcttgacagtttctagtgacaatcttttttcccctttacccgtagatactacgccattgtgcagccactggactatccactaatcatgacacagcgacgcgtgttcatcatgctattgatggtgtggctatcgccggcgctcctctcgttcctgcccatctgctcgggatggtacacaacgaccgagaactacaagtatctcaaatcgaatccgcatgtgagtagcttacttgaagcccttaattgggacaattaaatatttgtacaatagtgtataactctattatggagcccacagatttgatgagtaggtcgatccggtgtatgcacctacattatttattcaattttcttgcacatcaaactaatagaaaattctaatttagttgaaacggtatcgactttgcatgcattttgcatgccttcgatgccacgtgggcgtccatgtggcagtggcaacctttgacttttcccccgacccgcctcaacggaaattgatttatgtttgtgtggctgaagcagttttacgcctttcaggctgccagccgacaggtagcatatttattactccattttattggtttcctccgcaaatacttggcaaactccttggcagcacctcctccatctacaaatatatacatttatatatatatatatatatatatgttctctgcccgtcagcagctgctggtactgattccccccgccactgcggttatcattgcgcaataaaatgctgatgtagaaataaatgtaggtaattccattccggttttctgcgctcccattcaggctgacttcagcataggctgtgcataattttcggctctacacctggaaggacgcctgaaacgcctgacaggcctttgcatacattagcatccgcggtgggctttaattagttttacttgtttatgctaataactgtcagcgcgaagccggcagaatgtcctggccgtaaatctgattagatgtcttctggtggccttttgtcatggcagcgctgtaatgcacagcgtaattgagtttttattgtcgcacttggcattgcagtaatcgcattgccattgcaattgccgtcgcaatagccgttgctcatacgcaacgttggccgccgccagccgcagttggcaattgccgagcattacgctccattacggttcgccactggcatccgactgcactgctccaacgttcattttgatttattgatagtcgctaattgagttgcccatcaaatcgcaacgatttcgattccgatttcgatgctcccctcactccatatttcagatatgcgagttcaaagtgaacaaggcatacgccatagtcagctcgtcgatgagcttctggattcccggcatcgtaatgctgtcgatgtactaccgcatttaccaggaggccgaccgacaggagcgtctggtgtacaggtaatagctattcgagtggcccctccatttgcccgcttccaattaactctaattacttactgtgtgcgcccagatccaaggtggccgctctgctgctggagaagcatctgcaaattagccaaattcccaagccccggccgagcattcaggtggagcagtcgaccatctcgacgatgcggcgtgagcggaaggccgcccgcaccctgggcatcatcatgagcgccttcctcatctgctggctgccgttcttcctctggtgcgtatacttgatggctcaaattgggcaattatcgctagcactctaaggatcaagtgccgagaagtttttaattaactcgggctcatatcaaataatttgcactttccatgctacaggtgggcggaaagtgtgtataaacaattaacaatacaagtatgtttccttgggattgaaatataagaaaggcaatgtagacttaagcagtagttattatgcactattcaagtatctattccacctacttaaaagtaaagaatctaacactttccctttctccaattaaaccgcaggtacatcgtatcctcgctgtgcgatagttgcatcactccgcgcctgctcgttggcatcctgttttggatcggctacttcaactcggccctgaaccccattatttatgcatacttcaaccgcgacttcagggccgccttcaagaagaccctcaaggtgagttgcgggctggccatcgagtaatttgcatataccttccacttcgacatcttgatgggacttttattctattcaatttcgctttgttcgggcatccaaaactgaattctctgcaccaccttagacttagtacagggcttcggcaactgctgcaatcgcaaaggacagggccaacgccacccattgcacagaagcggcggcggccaccatttcgacaacagtatcgactggcaacgcggaggcgccaccaccagcgccccaccgacgaggctcacgtttagcaattattttggtagctattgcatagcatcacgggtgcactgagaaaaaacatgaacaatttatcaaatatattaagtaacttggagtaacttagttccagttacacgactaacaaataagaaaaaagatatggaaaaaagaacattgtctcctcattttttctcagtgcagctcagtgttccgcggagagcgtagatagcgtagcgttcatattagttgattgaaatgcttcttcatccacatctactggttgctaagcaaacaaaatagcttttcctctgcctgaagaactgaaaactctgcacgttctttgctctacagctctacagctctgcctgcgcctgcctctgtctctctatcagtttcattctcgagggtatctttcgggcatggtgaatgggacagtgaatgggggttgcaatgcttgggctttctaatcgcttgaacactctgcttgccacttaccatcgtatactaccatttgccatatatagtgccatataccatatatcatttctctttgcacgcatagctggcgcttactgtgctgattcgttgcctatggcccaacaaaagctaagcccgccaaagtatgcaacagcaaaacagaaagcataaaacgtaatatttaaattaaaacggaacctcttctttgtatgtatgcccagctacaaccagctacacctacaccttctccacattcatacaagcgtaaatgctgatgatgaaatgttattctttctctaaaaattctcccttttatgctgcacacttcgacacaccagcaacaccaacaccaacacacacacacacactgaggcacatggacgggtccttgttcgtcccttttttttatatgaatgcgcggcctttcatttcgtttagcattttttgtgtgagtctgttgtttgttttttgtttctttccctttagcctttgttttctgtgtgaaaccaaattgtcacagacatgtgccgccagcacccgaaaaaaaaaaacaccatacccctgtcgattgtgtcgcccgtcccacgcggcgtatgcttaacctttgagtgctgtacagtagcgagctaactctattaaattacatagcgtactctaacggtagcatgcgagtttatctcatctactcatagttgggtgtcctcttcattccacagagtctgtttccctacgctttctacttctgtcgacgtggcagggggcgagacgatgaccgggatctggagttcggcggtcccagccgacggggaaccaatggagcccaacggaccggatccggatccgccgagatggccaactgcgtcaactccacggcctcgtcggagatacacatgagcgtgatgcgtgcccgccagtatgccgtcaatgtcacacccaccacggacgcccagatgcagcagctgcatcccctgtacaccaactaaacgaaaaacacatatggcgtatacttgatttcaactccagtgcttcacaatgtctgttcatgagatgagtgcgcagtgcacagcaagtgttctccagaaaaccagattgccagcttacaaatacaaatcactcgataaaaacattcctcaaaatggctgctaagagggctaaacaagaatttaaccacaaataatagctaaagcaacagccacagcaacaatacgacaatcccacagattaaataaagccttcaagagcagcaaattgacgtgcaaaataaattgaaatcttatagaagtatgtatttcgacatacaatacatatttaggtgtcatggagtcaggaatttcataacgagatgtttataaatgcgcatgcaaatagatatatgaatttgaatgtttgatatacgtatataaaaagatagatgttaacccacaaaaaaaaaaataataaaatatgaaatatgcattgattggtaatctaaaacgaatcgcaaattaaagctacactgtgcaacagtggtatgtagtgagaaaaaaagtgtaggttcaaggtctggttgaaagaaaaaaatttttaatctgttcaattatttgaaatattaactttaaatacgatcaaacttatctggtcctttcacattttattcgattagcgaataaagactgacaattttattttatcagtgacttaaaaatgatttaattaaaacattatccacatattcaaagtacttaaccaggccttaaattcactttaactctccaataaacaaagataactaatgttagttgtagcagagtgttcgtattgtttgtaaaactcatactctcagttctgttagatgtaatgacaaagctttgatttgattcgttaaatacattaaaataatctagttcattgaaaaacaatcaaattatatatgtcataatacttacatacataggtattcatattcataaagaatacatatagggcctaaagcgcacgactaac

SEQ ID NO: 68 - DNA, 1675 bp, Drosophila
ggtttggcaaacgattggcaataataggagtcatcaaaacgagagcaaatgtcatacagcatgtcgtccttattccgtggcgttagtgcgacatttggagttggaaactaggagcccacttagactaacaacgcccgtgaccattaccatgacgctactgcagaggcttcaggccatgtcggccaccacgaccaggacaatactggagggcagcatcagcagttttggtggcgggacaaatgagcctctggcgagcaaaatacccgttctggaggagtcagcctcacatgccagatatttgaaattcattgccgacgggctcatcgacgagggactgggcagtgcggtgggcagtgggagcagcatcgccgtatccgttgaagacgtggtcgccggacaggcgcaggacatccaggcgagcgaaggatccaccgacgacgccgacggcagtagccatttggcattagtcttcgtcaagtgtttcattattggtttcatcatactggccgccatcctgggcaacatgctggtgattgtgtcggtcatgcggcaccggaaattgcgcatcattaccaactactttgtggtctctctggccgtcgccgacatgctggtggccctctgtgcgatgacatttaatgcttccgtcatgatctcgggcaagtggatgtttggttccgtgatgtgcgacatgtggaacagcttcgacgtctacttctccaccgccagcatcatgcacctctgttgcatatcggtcgacagatactacgccattgtgcagccactggactatccactaatcatgacacagcgacgcgtgttcatcatgctattgatggtgtggctatcgccggcgctcctctcgttcctgcccatctgctcgggatggtacacaacgaccgagaactacaagtatctcaaatcgaatccgcatatatgcgagttcaaagtgaacaaggcatacgccatagtcagctcgtcgatgagcttctggattcccggcatcgtaatgctgtcgatgtactaccgcatttaccaggaggccgaccgacaggagcgtctggtgtacagatccaaggtggccgctctgctgctggagaagcatctgcaaattagccaaattcccaagccccggccgagcattcaggtggagcagtcgaccatctcgacgatgcggcgtgagcggaaggccgcccgcaccctgggcatcatcatgagcgccttcctcatctgctggctgccgttcttcctctggtacatcgtatcctcgctgtgcgatagttgcatcactccgcgcctgctcgttggcatcctgttttggatcggctacttcaactcggccctgaaccccattatttatgcatacttcaaccgcgacttcagggccgccttcaagaagaccctcaagagtctgtttccctacgctttctacttctgtcgacgtggcagggggcgagacgatgaccgggatctggagttcggcggtcccagccgacggggaaccaatggagcccaacggaccggatccggatccgccgagatggccaactgcgtcaactccacggcctcgtcggagatacacatgagcgtgatgcgtgcccgccagtatgccgtcaatgtcacacccaccacggacgcccagatgcagcagctgcatcccctgtacaccaactaa

SEQ ID NO: 69 - protein, 508 aa, Drosophila
MTLLQRLQAMSATTTRTILEGSISSFGGGTNEPLASKIPVLEESASHARYLKFIADGLIDEGLGSAVGSGSSIAVSVEDVVAGQAQDIQASEGSTDDADGSSHLALVFVKCFIIGFIILAAILGNMLVIVSVMRHRKLRIITNYFVVSLAVADMLVALCAMTFNASVMISGKWMFGSVMCDMWNSFDVYFSTASIMHLCCISVDRYYAIVQPLDYPLIMTQRRVFIMLLMVWLSPALLSFLPICSGWYTTTENYKYLKSNPHICEFKVNKAYAIVSSSMSFWIPGIVMLSMYYRIYQEADRQERLVYRSKVAALLLEKHLQISQIPKPRPSIQVEQSTISTMRRERKAARTLGIIMSAFLICWLPFFLWYIVSSLCDSCITPRLLVGILFWIGYFNSALNPIIYAYFNRDFRAAFKKTLKSLFPYAFYFCRRGRGRDDDRDLEFGGPSRRGTNGAQRTGSGSAEMANCVNSTASSEIHMSVMRARQYAVNVTPTTDAQMQQLHPLYTN

SEQ ID NO: 70 - DNA, 3651 bp, Drosophila
ctggacgccggacacgaaagcagatcacctgccgtacagtgccaagatcatcgaacgcatttacaatgaggagatcggtgatggcggtggccacagtgcacggaggataaacatgctggagttcagtcagtatctggagcagtacctgtggccacactaccaacgtgaaaccgccacccatgcccaccttatgtccatcgttataatggccaacgagaagttccgggagcgcgtcgaagtttggaccgtgtttgaaaagctcccggatcagtatccagccttctttcgccacgtgctagagagctgtttgccgagcaaaaaggcaaaggaggctagtagcacgctaagggagcggacagcgctgttgatgttcattaaccactgctttaacagcatggagatagagctgtgcagagaacaggccaaacgactagtctccttgtccatgtggcattgcctgcagcctcgtaagttcttcttcgcaactcttcacatctatcaaagtgatcaaaaatgtatttgcttgcaggccgtcgcgaacaagagcttcgagaagttcctgagtggcgaaagtactggaaacgcttgctcaagaaggagaaagacagcaaaccggaggtcctctgggagagacactttatgcagaaccttatcattgacttcctgcacatactcgaaagcattcccgccgaaggcgaggtgccgcgcaacgtggttcactactgtgagcgcttcctagagtttattatcgacttggaggcacttttgccgactcgacgcttcttcaacacggttttagacgactgtcatctgattgtgcgggctcttctgtcacccttggttcgtcgcgaggagggaaaactgtttggtcaggtaggtgtcagacttctcatttaataactatctcgtacagcataaattagttaaaattaagtacaaatctcaatgttggacattgctaaactacgaaaacacttatattagtgtggacggtggctcctcagtaatcgttgccgttcatataatgcagctcatcgccccagtcgtttgccgacggtggctcattgtagcagcaggtctttttcagcagaaatgtcacatgtcgctggcgcagcacgcatatgtatagcaacagcggcgtctgcagggcgttaactacgatgtgggcgtaaagcaggccttccatctgcaaccaggacattatgaggaatagccaggctatagacattactaacagcatcagcgagaacatgataaaactgcaaggaagataatgttttcatatacttatatgtaatgcctagatgccgatctacttacttggctttcaatttgtgcgcaatgcggccgtataccgtcctgcggttaatcaacttcctggtggtcacatagaagaatatgtttaccaaaatggtacaagcaattggagcaaagaatatgcatatgcctagccagccgatcgtctcttgctcgcccaccatgtgctcctgtttgtaggattcggcgtcgaggaagaaatgtgcgaagacagccagtgcagccatcgttgctgtgcatccccaagcatacgcagaataatagcagtacttcctgccgtccgtgactcgcaggaagacgttcctcgaacgaaaggtcttccaaatgtaaaaaccgaaactgttcagccagaagaaagctgccaagaggctgaagcacaggataatgtccgccacaatgaagctcacatggctggtcagctcggtgaaaattctgacaaggtctgctgcctggcttaccataaggcacatggctatcgttgtcacaatgttaccaaccagatctctgctgaatggattgaaaattaacgcatgaagcaagtcaaattcaaactattgctcacctgagagtaggaagtataaaatagatgatggcgatgaccagcaggataacaagcgagatgccatggaaaattgggtttaagattttgcggagcagaaagtttgagtcactccacttgatctccttgcgggccaagcaaatgttggcgaatagcacattttcctctccagtactggaagtggcctgcgaatggattttatgatcatccatgcaatttatgtggactttagctactcttaccttgtcaatgcaatacaatcccttatcgtagtcatggtatagcggttccagactgccggcaatatcctcctcataatccgattgtattccatgacgctcctctgcttcgttttcggcattggtgtaatgccttagcctcccatcatccagtaacactagcttatcagagctctagaaaatataaaaatatctataagtatctaaaagtttctatgcaaagaacttcaaactcacgccagcatagtggtatattggccacatctgcatggatccacaatttggaatcccgatgacgaatttgaacttaacgggcctgttttgctctcctccatagctggtgaacatcggctggaagtagtctgcaaatggaaacggacgataaatagagaacacagaccgtggaaaatcataaaggcagttcaagttaacgctgcttttgttgcggctggtggatcagaggggagccagattttcttttctctctgcgaatataaatatttacgcttctgggcaaagaacttgagctgttccatgcgccttcatcagctggttttgcaatttgtgcagattggttcttcttcaattatcggagttcggatacatttttttccactcagccattcatatgttaatcatagctaagcacacggaaattagattgcatgttgcgattatgtgccctgttgtattgtagtattgggattactcaaatgactacaattaaaatcggatgagatcagtacaatgcaatgattcaactatcagtaatagttacatttttatgtgtcacctatatggccgatccatggtcataaatgttttatccagttttagttgtccgagctagaatatcgatatagatgctagagtacgcttttctatttcccacaattgttgcgattgtttgtcaaacattcacccaaggcaatatatcactatattcaccattagctccacaaacattaattaccagggctcgcatttatggggaacagaagcatcttatattaccttactaatggattttttgcctcattttacttccaagagataatattcccgatttgggaatccctcatcaagtggctactttatagtttaaacagaaacatgccccacagcataaatcatatttctcatcaggattggggccaccctctgtttgttttaagaactttcttgggggagtgcgaactgtggagttggggatatttagctgttggcttcgttccactgatccactgatagccaacaaatgggccatttaatgttgggcatacatatgttgcatgccagaagggaaaatccataaagttgaatggccaaccaacttcgttgtggttgttatggcaactttttcgagcgactaggagttttccgcctggccagctgttgaacttacccgtttcattgacctgctgacactcatggtccacgtgtatctcgaacttctcgcaacatttgttgaccagcactaggttgggatcggaagatagggctgttgatgatccggcgctagtgacatgactggtt

SEQ ID NO: 71 - DNA, 1272 bp, Drosophila
atggaacagctcaagttctttgcccagaagcactacttccagccgatgttcaccagctatggaggagagcaaaacaggcccgttaagttcaaattcgtcatcgggattccaaattgtggatccatgcagatgtggccaatataccactatgctggcagctctgataagctagtgttactggatgatgggaggctaaggcattacaccaatgccgaaaacgaagcagaggagcgtcatggaatacaatcggattatgaggaggatattgccggcagtctggaaccgctataccatgactacgataagggattgtattgcattgacaaggccacttccagtactggagaggaaaatgtgctattcgccaacatttgcttggcccgcaaggagatcaagtggagtgactcaaactttctgctccgcaaaatcttaaacccaattttccatggcatctcgcttgttatcctgctggtcatcgccatcatctattttatacttcctactctcagcagagatctggttggtaacattgtgacaacgatagccatgtgccttatggtaagccaggcagcagaccttgtcagaattttcaccgagctgaccagccatgtgagcttcattgtggcggacattatcctgtgcttcagcctcttggcagctttcttctggctgaacagtttcggtttttacatttggaagacctttcgttcgaggaacgtcttcctgcgagtcacggacggcaggaagtactgctattattctgcgtatgcttggggatgcacagcaacgatggctgcactggctgtcttcgcacatttcttcctcgacgccgaatcctacaaacaggagcacatggtgggcgagcaagagacgatcggctggctaggcatatgcatattctttgctccaattgcttgtaccattttggtaaacatattcttctatgtgaccaccaggaagttgattaaccgcaggacggtatacggccgcattgcgcacaaattgaaagccaattttatcatgttctcgctgatgctgttagtaatgtctatagcctggctattcctcataatgtcctggttgcagatggaaggcctgctttacgcccacatcgtagttaacgccctgcagacgccgctgttgctatacatatgcgtgctgcgccagcgacatgtgacatttctgctgaaaaagacctgctgctacaatgagccaccgtcggcaaacgactggggcgatgagctgcattatatgaacggcaacgattactga

SEQ ID NO: 72 - protein, 423 aa, Drosophila
MEQLKFFAQKHYFQPMFTSYGGEQNRPVKFKFVIGIPNCGSMQMWPIYHYAGSSDKLVLLDDGRLRHYTNAENEAEERHGIQSDYEEDIAGSLEPLYHDYDKGLYCIDKATSSTGEENVLFANICLARKEIKWSDSNFLLRKILNPIFHGISLVILLVIAIIYFILPTLSRDLVGNIVTTIAMCLMVSQAADLVRIFTELTSHVSFIVADIILCFSLLAAFFWLNSFGFYIWKTFRSRNVFLRVTDGRKYCYYSAYAWGCTATMAALAVFAHFFLDAESYKQEHMVGEQETIGWLGICIFFAPIACTILVNIFFYVTTRKLINRRTVYGRIAHKLKANFIMFSLMLLVMSIAWLFLIMSWLQMEGLLYAHIVVNALQTPLLLYICVLRQRHVTFLLKKTCCYNEPPSANDWGDELHYMNGNDY

SEQ ID NO: 73 - DNA, 5299 bp, Drosophila
gctgttcgcacggcatttttgggccagcaaacaggatgcggaaaaccggaagctgggaactggaaatgggcaagaatctggtttttggctgccattcaattaggtatcggtcagcccaattcaactgctgctaactggcaactggagatttggcgattgcagctgcccattgtcaacacttcaattaacgcaatagcaggtaaaaaggggacatcttttcatcgagatctcgaccttgttttgctatccttgcaaacaattgatggtatgtcgtaagtttgtgcgaataaaatggttttggaaatatatatatatattgtttattagtttatggccccaaaaaatgctacaacacaatattgaaaccgttgttatctgaagggaatgcaacgattcgagcttcatattgagaaggtcctgttttctctctgttcctgcatagttcctctttcatttcgcatctttttccactggccgcagtctcgcaggatatgctaactaaggactatgccaccatattcgacaatttgttgggcaccaagttaatatgcattgatgcgttattcatacgccccgtgggacgggcgaatagcaaaactctcaatgggcctttgttaatttgtatgtgtgtgtatgtgtattttgcgtgtatttgatttgatgcgtttagtacttaggataacaattacgtttaggttaactagcataaatctataatcatcacattatggcacaatgtatgttatgtagtatatatatatcgtatatatagagagactgatatacatagatatcgattgatataacaaattaaattttcagctaaccgcacgcttcaactgaatcacttttgattcaatcatctcacttgtgattccgcgtgatttgctggcaaatttaaagccctcttctcgtgtttcatgagaagtttcatgatatcatctatcactcctctcatggagtttaaaaccataaatattttattataaatattcactattcacgctatcaggcgacccgtattacgatttcgacgacttccggctccgccataattactaccataatgatcgccatttatttgggtcagtgtagtcgttgtatgcggcacatagagactcgtattgttacgcgcatgtcgacgtctatagcgatatcccgttatcagttctcgaaccgtctttcggtacttatcggaaagtacacagtatagaaaaaaattggatgccgcatgtagggaggccaataggttacacacatttcccgccaccacctgagtgccaatttgaatttccatatactgattgactatcaaatagatcgcccaaggcaattggcaaactatgaacattaacaccaccgcaataagtgtgatcgtcacgcgattttcctgcgatacgctgccttttagtccagaatttgatttgcgctaaggattcagaatttatacaacatatcatcatcatcatcatcgtttcgaataactcacttttgtgcgccttatgctgctggcattggtcaggtcaccacgcagattcttggaccgatgaaccaatagaatgagaatggagttgaaggtggccaatagaagtagggggaataccacgaagaccagcagggtgaacaggttccacagatagctgtatagctcatcatagcccagttccgaaagaccatgattgtaataggtcacctaaaacatatagatagatacatagaatacatacatagatttccattaagaacaaccttttaagcaatggaatatcccaagcgactaagtaaaagcatgtcttacaaaacccaaagcactgatatcattttaagttatcaccgaatttatcatagtcatggcgcttgtacaccgctcgtgattttcactggttaacaattttctcatgtttttttctccagggaaatcgacggtatttccaacattattttactcacattttgacagtattccgttacgttaaatgcgaatgcatccgtattgttgatgttgtgattctcagcgctgcgcttgcgacgccacaattgcagcaaactctctgtgacccctgacctctgggccgcgtctgccaccttctgatcctgctcctccagcgtttttctcagtgtgggcagcgtcacaaatccagatgactgccagtgacggcgatgtcgtggaatgttctctagttgagggcaaagaaagtaatgcaactatcaactacttcacttataaagctgtctaaaagtatgcttcgtacttttcaatgcatacttctaagcatctctattaatacaacttcgatttttccaagtgtacactactgctataccctcgttactcacctggctctccatcaccactgccactgccccagtcgacgagctgattagagctgccggacgtcgtggactccatggcggagtccggcgattgccaaatggtcgccggcgtgggcagcgggggcgtggccagtgggggcgtgactgccacgggtggcggcggcatgggcgagatgttggccaccgtttggttgcacggctggtaggcgtcatcaatctgcctagtaccaatcgtaattgtatgctcgaatgccgtcgatagtgtggacagcaaacagaagatggccaccgctggcaatgtagaatataaagttgcatatggaaatggattctattgttacatacgcctatttcagccaactcacctgctatcacctttttggccagcgattccgtgcagaatgtttgcctcttgagcggatagcgtatcgcaatgaatctctcgatggtgaagcacacggctatgtaaattgagatgtaacctgtccggtaaaaacagagaaagcaattgtgaatgggggcgtggcagtacaatacgaacgcaatcaaagatgcactgcaaatattttgggaaaatccaatccaaaaaggatatatatacatatatatttattcaggttaagtgtctaatatagattggtaaattaaattcaaacttcggttagactgtgccttttttccgtgtactctggaattataaataaacgcagctccgctgttaataccccaaaccatccatttttgaccgcaccaccaatttatttgccgcgcgggctgtcaatttattcaaaacgcagcgcactctaagcgattgacgtccgtgctgtgctgatgaggttgctgcgggagggtgggatattcaaggggggtgaggggggtgaaaagtggggtgggaaagcggaaaacggttcggaaaaacgctatcgcatggcagtgagcctcagctgaccgctggcatttcgcagaaagcgctgcttactatacctcgtaaattggcagagctcaatgaaattgatgcacaacagaaacagcagcagcagcagcagcagcagcagcagcagcagcaacagccgcaggtgcaattcgaattgatgggcccatcgctggaatccggttgatacggggggaaatgggggatacattggatccggggatccagacgaggctaacccggggaactggggaatttatggaatccgcaccattccacttagtgctctccaaacgttgcattcgaactgtttttgttttttgcccccggcagcaattgttttcaccgcatgatatgtacgcttttcttattgtagttttgcgggaataatgttaaatataaaaacacccttttggtaaattttttcaaattgaaagcttatttaagcataaaatactcgtgtttcgatttaaagaacactaatcgagttactttcggtctcacaaccttatttattgcatactttgcgactgctttgaattattgaattattactccattgctacttaattctaatttggtcagtactcaccgaaactgtcgcacagccagacaaaatagccatagagctgccagtagagcttgaaatgatacttgggatagtcatagtgctggagtgacaggattaactggcacgtcaggtaggcaatatccgtaatggccagtgccgttagatatatgttcgtcgtgcatctcatgcgctttctaaaaataccgtcaagaatatcgaaaagaattgcaaatggtgttgattctgttgggcactcgacgcatttggaaatcaggccaaaccatttcggtggacaatgcaaaaacgctgccaagtgcaacaccaattgaaatagcaaattgcctgaaagccaaacgatcggtggggttgtgcgcagagggggtggaaaattccaggcggttgatgtgatgggcgcggggccttgggcattttccgaaatgcgcacaaatgtcggcacagtcataaagccaaaagatgaacaataaaaactaactgttagcatttagttttctccctggcatcgcccgcagctctgatagttaaattctcttgtattcccgtaaaacaaaataaaataacgtaatgaaaatatttaattaaaaagccattcatgccgtcaacgctcaatgttaagctagttgctttgaaaagttgtaaatatggtttaaaataataaagttcatgctataaatatcaataaattttgtttagcaaataaatgaatttgctaagatcttagcaaggaacacagtttatctttttttttcacgttttcctgggaaatggacatatggtgtcatagcagtcagcctaacgcacagagcacttgcaactgtcgcatattttccggcagacataaaaaacacacccatccacacagcatatcgcctatctgtgtgcgtttttgcatttggcacataaaatggctcttattgtttcagttactgttattgttgttgcacttgtacccaacgtagttgttgctgttgttattgttatcgttgttggctgtgtggaaatgattttaaagtgcagcggtggctacaattaaatgtcgtgtttaatgcgctgcgtacctgctcgccgcttcatccatgttccacttatttcacacacacagacacacacacacacgcacaacaggacatgcagttggatgcacagagagaaaatcgtgcaagttagctggcattttaaatggaaaattgtaacttaaaactagtttaaaacaagctcaaacgaataagttgaagtttggaataaaattaatttgaaaaggctcatatattttatatgcattgcatactttttagtacttaaccaaatgcatgaaaatccaattagtcgcttttgcatacctaataacttaacattcttaacgtggcagctaaaacttctttcaaatgccatcatcagctaaatgattcatatttaattcgaaaatcttgtgaccctgctgcatg

SEQ ID NO: 74 - DNA, 1467 bp, Drosophila
atgactgtgccgacatttgtgcgcatttcggaaaatgcccaaggccccgcgcccatcacatcaaccgcctggaattttccaccccctctgcgcacaaccccaccgatcgtttggctttcaggcaatttgctatttcaattggtgttgcacttggcagcgtttttgcattgtccaccgaaatggtttggcctgatttccaaatgcgtcgagtgcccaacagaatcaacaccatttgcaattcttttcgatattcttgacggtatttttagaaagcgcatgagatgcacgacgaacatatatctaacggcactggccattacggatattgcctacctgacgtgccagttaatcctgtcactccagcactatgactatcccaagtatcatttcaagctctactggcagctctatggctattttgtctggctgtgcgacagtttcggttacatctcaatttacatagccgtgtgcttcaccatcgagagattcattgcgatacgctatccgctcaagaggcaaacattctgcacggaatcgctggccaaaaaggtgatagcagcggtggccatcttctgtttgctgtccacactatcgacggcattcgagcatacaattacgattggtactaggcagattgatgacgcctaccagccgtgcaaccaaacggtggccaacatctcgcccatgccgccgccacccgtggcagtcacgcccccactggccacgcccccgctgcccacgccggcgaccatttggcaatcgccggactccgccatggagtccacgacgtccggcagctctaatcagctcgtcgactggggcagtggcagtggtgatggagagccagagaacattccacgacatcgccgtcactggcagtcatctggatttgtgacgctgcccacactgagaaaaacgctggaggagcaggatcagaaggtggcagacgcggcccagaggtcaggggtcacagagagtttgctgcaattgtggcgtcgcaagcgcagcgctgagaatcacaacatcaacaatacggatgcattcgcatttaacgtaacggaatactgtcaaaatgtgacctattacaatcatggtctttcggaactgggctatgatgagctatacagctatctgtggaacctgttcaccctgctggtcttcgtggtattccccctacttctattggccaccttcaactccattctcattctattggttcatcggtccaagaatctgcgtggtgacctgaccaatgccagcagcataaggcgcacaaaataccgaaagacggttcgagaactgataacgggatatcgctatagacgtcgacatgcgcgtaacaatacgagtctctatgtgccgcatacaacgactacactgacccaaataaatggcgatcattatggtagtaattatggcggagccggaagtcgtcgaaatcgtaatacgggtcgcctgatagcgtga

SEQ ID NO: 75 - protein, 488 aa, Drosophila
MTVPTFVRISENAQGPAPITSTAWNFPPPLRTTPPIVWLSGNLLFQLVLHLAAFLHCPPKWFGLISKCVECPTESTPFAILFDILDGIFRKRMRCTTNIYLTALAITDIAYLTCQLILSLQHYDYPKYHFKLYWQLYGYFVWLCDSFGYISIYIAVCFTIERFIAIRYPLKRQTFCTESLAKKVIAAVAIFCLLSTLSTAFEHTITIGTRQIDDAYQPCNQTVANISPMPPPPVAVTPPLATPPLPTPATIWQSPDSAMESTTSGSSNQLVDWGSGSGDGEPENIPRHRRHWQSSGFVTLPTLRKTLEEQDQKVADAAQRSGVTESLLQLWRRKRSAENHNINNTDAFAFNVTEYCQNVTYYNHGLSELGYDELYSYLWNLFTLLVFVVFPLLLLATFNSILILLVHRSKNLRGDLTNASSIRRTKYRKTVRELITGYRYRRRHARNNTSLYVPHTTTTLTQINGDHYGSNYGGAGSRRNRNTGRLIA

SEQ ID NO: 76 - DNA, 3946 bp, Drosophila
ataaatggccgaatttgcaagtcagttccacttgctctttaaaaagcgaatctcaccgaaatttaagcaaaatttatcaccgaccaatgtgaaattccactaataatttttcagcggtgttgatggctttattgacatcgccagaaatgattcgagctgtagcagcgaaaatttaatcaaagacctaacccacgaacctggacgttctcacatagaaaatgaaaacgaaagctgaaagacagatggatcgttcgatgtgagctctttttacacttggcttacacgacgactgcggcgtcggtaaaattaatataccaaacaattacacggcccggcaaaacaattttaagcccagttaatgccgtcgcacagtggctgcaagccacgcaaattcgccgcgaaaaattgcccacaattgccagtggccgagaaatgaaagcgctcaaatttgcatactcgtactgtcaaatgaagcgtagcaaaaggaaaattgctacacatactaattggaaaagaaatgcaaaaccaatgcaaatgaaaataatgacagggcgcggtttgcgaagctgtctaattatttatttgacattggcaatgacaatgaaaccgagagtcccacagcagagtaatggatttttctttcaactgcttaagttcgttttccattgaaatcttatttggacatataaaccatacgtagaatgataagaataataaaaaacaagtatgttggacacaattgataaggaatctttagtactttctcacctaaaaaaggtgatatatatttgaattcatgttgtcatgatagctactcgaaccactgtgcgttggctacagtctgctgatgctcacagtgtttgaaagttaagacttttgctttccttcccccgacttggtttttgcttttggaaagaccaagcaaatggataaacaagagttcaagaggttgtcagccccgcccctttgcgcacatgaggcaagaaagaaaagaaagttattacaaaattaacagaggctgacagctgacaagggcagaggaatggggccgaaatggaactgtatctagcttgagttgggtccgaccgcctcgggcagaaaatgtgacaaatttggaggggaaaagctcgtatgagcgggacttaccacctccattgttggcactggagcagtgtttggagctgagtccctggcccgtgttggatgcagagttgggcagtccgcagccgctcatcacgccgtacttgatgggcttgaagtggaagaacgagggcgagtagccggaaccggcgcgactcagggaactgaactgctcctcgcggtcctccacgtacaggccctccttgcccatggccgccagttgcctgcccttgggcatgaacatcaccaagaagaccgtggcggatgtggctaccagaccgaaggccacgcaagcgtccttgtgccgctcggccacggccaggccgcatagcatccatcccagccagatggggatggctcctccgatggccagcccaatgtaggtggcctcacggtagttgtccctgatgccgcgcgacttgatggctagcacggcgatgaagacgatcagaaagacaatgtagatcagcgagaagagcagctccgagaactgcgtcttgcagagcggtattagtacggtgctaaccgccgctatccgggtgtagatctccggagtcccgtccagcgttgtgtaggacgtggggtaaaacagtgccgagtagttggtctgtgaggccaccgtggtgctaaggaagccactgcccatcacaggcacactggtggtgtatacctccggtggttgggtgagcagccactgccctccgatcgctacctggatgagcagcgcaaagaggagcagcaatccctggtatggagccggcagatacacccctccatttagactaatcagaaatacgcatttgaccagcagggcggcaaagaccagggcgtaggccacgcccactccgaagcggatggccccgcaactgatcaacgagggctgtgcggtgatgatggcccccaaactagcgcaggcgaacagaccgagaagcagcatctggcccagaaagaggtgcctacgcgacggggacgtccgccaggccttgaagagcacaaagatctcgaacgctgccatcatgagcatggtgagggtggccaggactagcaccggcaccacccacggctccttgcgtagtcccgcgaagggcaagtgggtggacactatactgggcggtgtgctgttggagctgctcccgggagtcacccgtccagtggtgccggctgctcgcgccttcgcccctgaactccgacggggcgtggctggtgtggtggtggacgtggtgctgctagaactgctggccgatagtgtgggtaccacaaagaattccgtcgacatttcgagacgggcagcactggagacattgccacccggaaaattgagatccaattgtttggcagatcgctgggtctgaggagctgccggagtagtggtactagtggtgctacttgtagtacttgtagtcgtgctggtagtagtggtggtgctggtggcattacggctactcggcttaagcacctggtaggcgttgcgatccgattcctggctggtcaccaggcgcacccgccgccaaatgttgttgccattaacgctgaggctgcgcgacgccggcgtggtggcgatcaactgcatgatcagcagcaggatcagcagcaggtggcgtctaccggccattggatgtggtgaccttcgatgccctggacctctgacaatataatcaaacgcggcacatctcttgcaaacgcacactaaccacgcactcgcgatcgcgattgttcaggttcgtaaattcttcagtcctcgcaggccctagatcatgaattcttcttctcgattctcgcgctaaaacgtccgctcgctccgatcgaccaactgcaactgactggcggctctgcaagttgggctttggaccggcttagtcgtttgagaccagtttgacggcagccaagtcgaactaacacttgtttgagttcgatgtgcgtttgctaacccggctaacacttacaggaacgcaacatgatgcgtgggaggcagttggggtttggggcgctttatatgattttttgcaatgtagagtattgcacgagcatttactaaagcatcctttgaatttgatacaacattcgttactcgatcttctggctttaaggtttagtatatagcttcaacaactaatgttctaaatagctcaatgtcttgctgaagggctattgatttcctctcgaaagctatggtacttaatttcctatttagagccagtaagaactcaatttatctttagcttccgtgctaatccgctggaacatatactttaacacaacatttacatacgtaagttttttttccatttgataattattccaattagatttcatattgcgggatattaacattggacacaattttttcctctgcggttggttgcaacatcaactgcagacgcgatccacagacctagctcaggatccacactcaaaccgactgcgggatggagaacactttcattcgttctgcatatgcggaatttcggtttatgggctctgatgctcgagttggctggtaggaaagtgctatgggccattatctattagccaaccgcttttacggtctcctcgcggagcctctctcctcgaaaacgagccaacaaaaggccaaatagcgaaatccgagcacaaaaggtgattgtaaatcaaaagagcgctaatggtatatcgatatacaaagtgttgaggcgggaaaggcatcgccaatagcgttagaaacggcaatagcaatagcaacccgctctgattccttaggtcttattgtattcggcgcgcgctttcagtcaaccgcagttagaattcagatcacctgaatgagtgggca

SEQ ID NO: 77 - DNA, 1946 bp, Drosophila
tcgatcggagcgagcggacgttttagcgcgagaatcgagaagaagaattcatgatctagggcctgcgaggactgaagaatttacgaacctgaacaatcgcgatcgcgagtgcgtggttagtgtgcgtttgcaagagatgtgccgcgtttgattatattgtcagaggtccagggcatcgaaggtcaccacatccaatggccggtagacgccacctgctgctgatcctgctgctgatcatgcagttgatcgccaccacgccggcgtcgcgcagcctcagcgttaatggcaacaacatttggcggcgggtgcgcctggtgaccagccaggaatcggatcgcaacgcctaccaggtgcttaagccgagtagccgtaatgccaccagcaccaccactactaccagcacgactacaagtactacaagtagcaccactagtaccactactccggcagctcctcagacccagcgatctgccaaacaattggatctcaattttccgggtggcaatgtctccagtgctgcccgtctcgaaatgtcgacggaattctttgtggtacccacactatcggccagcagttctagcagcaccacgtccaccaccacaccagccacgccccgtcggagttcaggggcgaaggcgcgagcagccggcaccactggacgggtgactcccgggagcagctccaacagcacaccgcccagtatagtgtccacccacttgcccttcgcgggactacgcaaggagccgtgggtggtgccggtgctagtcctggccaccctcaccatgctcatgatggcagcgttcgagatctttgtgctcttcaaggcctggcggacgtccccgtcgcgtaggcacctctttctgggccagatgctgcttctcggtctgttcgcctgcgctagtttgggggccatcatcaccgcacagccctcgttgatcagttgcggggccatccgcttcggagtgggcgtggcctacgccctggtctttgccgccctgctggtcaaatgcgtatttctgattagtctaaatggaggggtgtatctgccggctccataccagggattgctgctcctctttgcgctgctcatccaggtagcgatcggagggcagtggctgctcacccaaccaccggaggtatacaccaccagtgtgcctgtgatgggcagtggcttccttagcaccacggtggcctcacagaccaactactcggcactgttttaccccacgtcctacacaacgctggacgggactccggagatctacacccggatagcggcggttagcaccgtactaataccgctctgcaagacgcagttctcggagctgctcttctcgctgatctacattgtctttctgatcgtcttcatcgccgtgctagccatcaagtcgcgcggcatcagggacaactaccgtgaggccacctacattgggctggccatcggaggagccatccccatctggctgggatggatgctatgcggcctggccgtggccgagcggcacaaggacgcttgcgtggccttcggtctggtagccacatccgccacggtcttcttggtgatgttcatgcccaagggcaggcaactggcggccatgggcaaggagggcctgtacgtggaggaccgcgaggagcagttcagttccctgagtcgcgccggttccggctactcgccctcgttcttccacttcaagcccatcaagtacggcgtgatgagcggctgcggactgcccaactctgcatccaacacgggccagggactcagctccaaacactgctccagtgccaacaatggaggtggtaagtcccgctcatacgagcttttcccctccaaatttgtcacattttctgcccgaggcggtcggacccaactcaagctagatacagttccatttcggccccattcctctgcccttgtcagctgtcagcctctgttaattttgtaa

SEQ ID NO: 78 - protein, 583 aa, Drosophila
MAGRRHLLLILLLIMQLIATTPASRSLSVNGNNIWRRVRLVTSQESDRNAYQVLKPSSRNATSTTTTTSTTTSTTSSTTSTTTPAAPQTQRSAKQLDLNFPGGNVSSAARLEMSTEFFVVPTLSASSSSSTTSTTTPATPRRSSGAKARAAGTTGRVTPGSSSNSTPPSIVSTHLPFAGLRKEPWVVPVLVLATLTMLMMAAFEIFVLFKAWRTSPSRRHLFLGQMLLLGLFACASLGAIITAQPSLISCGAIRFGVGVAYALVFAALLVKCVFLISLNGGVYLPAPYQGLLLLFALLIQVAIGGQWLLTQPPEVYTTSVPVMGSGFLSTTVASQTNYSALFYPTSYTTLDGTPEIYTRIAAVSTVLIPLCKTQFSELLFSLIYIVFLIVFIAVLAIKSRGIRDNYREATYIGLAIGGAIPIWLGWMLCGLAVAERHKDACVAFGLVATSATVFLVMFMPKGRQLAAMGKEGLYVEDREEQFSSLSRAGSGYSPSFFHFKPIKYGVMSGCGLPNSASNTGQGLSSKHCSSANNGGGKSRSYELFPSKFVTFSARGGRTQLKLDTVPFRPHSSALVSCQPLLIL

SEQ ID NO: 79 - DNA, 3524 bp, Drosophila
aaatttgtataactttcagttcttatactcagttattccattaatctctaatcccacgacatttaaatacacatacaaattttttatacaaagtttgctttattgactatttttgaagcacatttaccatatctgtattattaaaatacttagcatagattacagaattttcagcttattccatgaaatactgtttgtcaaacaaacagatttcatcagtttttgtttttataatcctttttttttgggaaagattctcatatatttacaattataatttaaaatagtctctactttagcttactacatattcaattaaatctcaggaggctgacttttccgcggacttttatggtggctctgacccaactggatgcatcctgcgcctttcctcgcagaaaagtattttatttcacattttacgggcgtcttggctggctgtcttacctctggctaagatgcttattttatacaaatccgacttttgcgattttaattgcataaatcagcttagttatttaattggtttattaatctacgggagaagcaaccattttattttaggtaagcactaagaaaaagattggatcttaagattccgatattattatatatctttatttacttagtaaaaggatggggatttacgtatattttatttaagagggtatattggcagtaaaatatttattcaaattgtgggttgtacagtttatattaattattaatatgttattagctgtcaaggcaataagaaaatgtaatccatttcagcccccttcagttaaatatattgctaacatatcgatgtgcggttgtacagactcattttcaaatctttgaattttaattctgatctcggtttttattacgtagacacatattaatactgcttagtcttaagttcttcattcatatttggataagaaaggattataaaatcatttaaatgcatactataatattggcttatttaaaggaaattcctacttaaactgggttacaaatctgtctgctgcactgcgcccgatcctcttctcgcggtggtgcaaaatgcctcctgctgctcgctcaaacatataatcaaattctccggcggagctgtcactttgccattggaattgcatgatttctgtgtccccgtggttccggtcttttccgctgtcgtggtcgaggatgtggtggtcgatgaattgttgttacccgcattcagtggcagcagtggaggaatctgcggattgctggtcaacaggcgcttggagccacccctctttttactgccctgtttggtgaaaacactgggctccagctggagttgagcgttgatatcctgcttattcatacaggtaaaggccttgaagaagctcttccggaagttctcacttaggaaggcataaagtatgggattcaccgccgaattcgagtaaaccagtgcccccagaagtaggaaaatgagtatttccagtcgggagaggtccctttgcgcgggattcgagtgaatcagggccaccttggagatccagtggtgtgtaaataaaaaatcgaatatactttataattaattacctgagaaatccagtgagggagccaacatagaatgtatacacttatcacctgcggattgaaaagaaggtgggaatctacaaatgaattgaactgattatttcggcattattaccgtcagtaccagtcgagtgaccttcctgtgagcccgcctcttctccttggacttcgttcctggtttgggacccaccgatcgcagtttccttataaccaagtagtagaaactcaggataaagcacagcggtgtggcgaatcctaggaaaaatgtgtacagtatgaaggtggtgcccgaatgcttcttgtacgcatctggccacattatgttgcacgagtaattgatgccatcctcctgctccacagtgctggcataaaggatcacgggcagcatgaggaccgctgaagttgaccaggcaatcgctgagaccactttggcaatatgcagagttcgatatcgtggcgaggaaatcgggtggcataccgctatatatcgatccgcggacatgatgagcagaaaaatcgacgaggtgaaggaggtgatggatgtgctcaccatgtaggctttgcacataaactccccgaatcgccagctgcaaattcgcattgtgtacagcagaaagggtattccaatcaggaagcactcgtctgccaccgccagattcaggatatatatattcgtgaccgtttgcattttggaaaagcgcaacaccacgtagatcaccagggtgttgccaaataatccgataatgcacacaaatccgtagagcaccacagtgaacaagtcagcaaaggaattccgcgtggctatgcaatgttgataggtgggcaaatcagtgccataaagggactcctctggctgaattgtggaactaccactaatccatctatggttcagttccgtggtatataagctctcgttcgtgttataccaatttgtggcatttgcctctgaatcggctgtcatttcccctttcacaaactggaggacatccatcatcagccacgtaaacatatttccacctaagcgctgtccagttcaaatttaattattttaaataggttttacgcgttgttgctccccgctcgttttgttcttgcattttggcgttgctgcaaaatacattttgttattacgtgaaatattttcagacacagttgttttggccaaacttgattagttactaattgaaatactgtggtgctattaaagaaaaaaacctaaaaccttcactagtctagtcaatattttttattccaacgtaagtttaaaatgtactgtaacaattggtgataagtattcaaatggaattaagttaagtctacaagttttataagatattttaatataactagattgcagctctttaatgcatagtgtatatttttaatatattatgagtttacttttaagtggcagtcaattttatttgctgtcttaacatctttgaatcgtatgtaccccattcgtaatgccacttcacatacagattcttttgcaactttactacaacttttactgactttctgagaaatcccctcgaaaattgaaaactttcctgaacaacttgtagaaaaacaaacctttaaaaatacgacgtatgaaataaatcgtctgtttcctgcttttgaaaagtgagttaccacaaatttggtttgtaaggcgaaggaaattaacatttatatttaaattaaattgctcacagcttgacacgtccaacaaacaagaaacaagaacttttttatattctgacctaactcgacactttctgtaaataaattaggcgtaaggaaaagctgggcagcatttatgcaaatatcaggtgaaaatatttgtcttctcggaagtcggaaaactccagctatacagatccccatggttttgtattaggagattgaaatttaagccgatttgtttgtgcattccatgcacatcaaatattgttgactgagccaaaacacatgtg

SEQ ID NO: 80 - DNA, 1356 bp, Drosophila
atgacagccgattcagaggcaaatgccacaaattggtataacacgaacgagagcttatataccacggaactgaaccatagatggattagtggtagttccacaattcagccagaggagtccctttatggcactgatttgcccacctatcaacattgcatagccacgcggaattcctttgctgacttgttcactgtggtgctctacggatttgtgtgcattatcggattatttggcaacaccctggtgatctacgtggtgttgcgcttttccaaaatgcaaacggtcacgaatatatatatcctgaatctggcggtggcagacgagtgcttcctgattggaataccctttctgctgtacacaatgcgaatttgcagctggcgattcggggagtttatgtgcaaagcctacatggtgagcacatccatcacctccttcacctcgtcgatttttctgctcatcatgtccgcggatcgatatatagcggtatgccacccgatttcctcgccacgatatcgaactctgcatattgccaaagtggtctcagcgattgcctggtcaacttcagcggtcctcatgctgcccgtgatcctttatgccagcactgtggagcaggaggatggcatcaattactcgtgcaacataatgtggccagatgcgtacaagaagcattcgggcaccaccttcatactgtacacatttttcctaggattcgccacaccgctgtgctttatcctgagtttctactacttggttataaggaaactgcgatcggtgggtcccaaaccaggaacgaagtccaaggagaagaggcgggctcacaggaaggtcactcgactggtactgacggtggccctgattcactcgaatcccgcgcaaagggacctctcccgactggaaatactcattttcctacttctgggggcactggtttactcgaattcggcggtgaatcccatactttatgccttcctaagtgagaacttccggaagagcttcttcaaggcctttacctgtatgaataagcaggatatcaacgctcaactccagctggagcccagtgttttcaccaaacagggcagtaaaaagaggggtggctccaagcgcctgttgaccagcaatccgcagattcctccactgctgccactgaatgcgggtaacaacaattcatcgaccaccacatcctcgaccacgacagcggaaaagaccggaaccacggggacacagaaatcatgcaattccaatggcaaagtgacagctccgccggagaatttgattatatgtttgagcgagcagcaggaggcattttgcaccaccgcgagaagaggatcgggcgcagtgcagcagacagatttgtaa

SEQ ID NO: 81 - protein, 451 aa, Drosophila
MTADSEANATNWYNTNESLYTTELNHRWISGSSTIQPEESLYGTDLPTYQHCIATRNSFADLFTVVLYGFVCIIGLFGNTLVIYVVLRFSKMQTVTNIYILNLAVADECFLIGIPFLLYTMRICSWRFGEFMCKAYMVSTSITSFTSSIFLLIMSADRYIAVCHPISSPRYRTLHIAKVVSAIAWSTSAVLMLPVILYASTVEQEDGINYSCNIMWPDAYKKHSGTTFILYTFFLGFATPLCFILSFYYLVIRKLRSVGPKPGTKSKEKRRAHRKVTRLVLTVALIHSNPAQRDLSRLEILIFLLLGALVYSNSAVNPILYAFLSENFRKSFFKAFTCMNKQDINAQLQLEPSVFTKQGSKKRGGSKRLLTSNPQIPPLLPLNAGNNNSSTTTSSTTTAEKTGTTGTQKSCNSNGKVTAPPENLIICLSEQQEAFCTTARRGSGAVQQTDL

SEQ ID NO: 82 - DNA, 7448 bp, Drosophila
agcatgcggctgaacaaaaaaaaactcgaggaatggccgcaatttcggtgagccatataaacaacataacatatagttttcccatccatctacgctgtctgcgccactggccaagtccaagttgtcttgacggcccggcaaaaagcaacatccaaggaaaatgttgccattttagatgcgccgcccgctgagcggaaaagtcgcgcggaaattactaaatcgatacgtgctgcgtatcagattttccatgggttctgcatgcaaaaataccttgaaatccttgcctgcagtcgcacacatacacgtattgccatctttgtacagacaagcttgactaagtcgaactttactatgttattctactaaaaggttttaaagcaaatgatctatactatactatactattaacttcaatagaattcctattttctctggctagcaaacaaatttggatcataaaaagattttcatggcatttatgagatacgtagattgtgtggctcaaccttttatctatattatttccataaatttaagcaccaatggaaatgtttatctccaaagcttaggaaaatttggaagtatatataataaaaaccttttatgtctgcaaataagagatattacgtgtatactgagtttcgcttgagtttcggagttaagaggcttccctatagactgtttgaaaatcctataatgccttggcatttctaaaaggtcaactgaaagcagtggaattgctggtgggcgaggttcgtctcctaagtggcaaaatgatccagaatcggaagcaaaccctgacgatgaaataaactatacgagaaactggagaacaattacacatggactgtgggtgcaattagggaccacacctttttcgctgccgacgcgtctaaagttaatgaatatgttaataatatgttatgcgcgtgcaaatttgttcagggcttgaggggttttctgtgtttctgtttccaggcgagtccagtccaatccaactctatcgcctgatggacatggtgttcgtggggaactgtggcttctggccggcgctgaagaagcgtttgcaggtgaggcgccagaaggccgcccggaagtcgacgctgtagaaggcgtagatgaagggattaatggcgctattgaaccaacccagccaggtgagggccttggccagcatttggctggcctggtgttcggccaggaacggggtgatcagatagttgataaagaagggcagccagcaggcgataaagccacccaccacaatgctcagggtttgagtggtcttgttctccttcttcagcgacgtaatccgattggacagcgatttactgttggtgttggcactggtgttcccgctagtcgatgtcgtggttacgcccgcctggtgatgataatgaggatggtggtgatggcttcgcagtctctcgcggtcccgctccccatgcgaatgcctaaagctgtgtgttcgcggtggctgcgatagggagtgggtctgcacctggcccgtttggcccggcggctgggactgccattgcgcatccaggagactactgcctgggcccatgccactcgtcattgtggtaatggtcgttgaggcggtggaagcgcgcttcagcgaggagggtcgtgtgagttcgtagcacccattcttggcgcagcccatggagccacctactccgccggagggaagggccagcagggattgacagtgtgtgccgccagtggcactacttgctcctccacccccaccacctgctcctccagcgcccatcgccgcacaattgtcgctgtcgctgagcatcatgtcttggagctccttggctatcgtctggttggagaacgttcgcgatgtggcctgtctctggcgctggcccaccgagctgtgctgctcctgctccgacagctcattctccacgtccgctgccgtgtagcgcttgaatttctagacacgcaaagtgcacaaggcggttaagtcaatgtcgatgataaataactaaaatagagtcaatgggcggcaaaaggcggcaaagataaaagaaacggaaacggaagtcacgctaggaaaagccgaagctttaaacactcttgtaggcatcatcatatactttaaagggaaccacactggtaagcagatggctttaagctgatttaagactacatacccaaatgccatgcggccattgttctatcaactgcacgatgtgctaatctctctaaacataaaactgaatttcagaccggttttaatgcgtatggagctgcctggacttgattcagtttaagtgaattttaagcctattttaaaatgcacaccaggtacacatacaaatgtatatatgcagatgcaattttcgaagcgagcatcgtttagtgttagctatttagtgatgctaacttaaagctcgacataaatgagtcgaatatgtaattaccctggtattcaaggatgtagcaacattagcaacatttcataactaacatttttgaaaagtattcaactctaaagcgccaaactgctctctcgttagaaaacggttagttgaaaactcattaattcagctatacgggctgccagagttgaagtgaaaaacttgttttatagcggacactggaccggaaattggcacataccccgatgcgagggtatggtatttaaatctgtgtgagctcctggcatttgggaattatgaggcaaacgtgccacagtttgtgccgcacgtggagtgtcctttaagccggagtggttcgcaatagagatgactttcgctggtcgggccagcgtttgttgtttgcagctgccgtggttttcctattccatattccgtatttgtgcactatgttggctttggggttttggatggcgggagacgtgcgaatgtttgcaggcaaacagaaggacatgcggacattgggacatggttgcggatggctgcgacggagcttaccttgttgtgaacacttatgtcggtcatattgtcgtgcctggatgcaatgacacaggaaattcttgcatacacataaatcatgactgccatgggtatgaagaaggagcccatggccgagaagatgacgtagccctcgttctggttgtatcggcactcgcgcagatcccttcgtcctggctcgtacctgcgggaaatggaagtgagcaggatacgcttaatgggccaccaagttagtcaactaatgcaggaagttcccaattatttgactacggagctgtgaccctcggaggggtcagaggtcgcaagagcagcagacaattgccagctaattatattcgtttgttcagctgggtgtcgccagtcagtctgctcggaggtctcgaaatttattctaattaatttacactcacactcggcgacatttgtaatgcttaaaatggaccaaaaagatacccaaagtggtccttcaaaattatgcaatggcatcttttgacacaattttctgcagtcaacaaaattgttgatttaatttcatttaagcaaattaagctttaattatttttgtaagttaaataaattaaacatctcttggttacatttcggaattctgctgcctacaggaacatttagtatatttcttcaaaaaatctgttgactgtgctaacgaagttagatataaacaaagcactttaattaattctccttttagttagttagacaaaagtagagagaacaaaatttgttcttaaagctagcagatgcggtataccaacaaggaagttgatgtttaggttaaaattcggtgcatctatttagtgtgtggactgttgaccaacttagaagacttcttgctgcactccttcttcgttatggaaataaccctacatactgattatttcttcaagtgtacttaccatcccagcatggggggacaggtgatggccaacgcgagcagccagacgattaggatcatgatgagggccaatcgtttggagcgccgtttacgggagtacgtgagcggtctggtcacggccaaatatctgtcggatggacgtgaaggatgcaaagatttacgatatcaggggaatactatggatgttttggataggcctatgctcacctgtccacactgatggcgcacaggctgagaatggatgccgtgcagaggagcacgtccagggagatccaaatgtcgcagagcacccagcccagttgccacgagcctgcaatcaagattccaaattaaaaactttccgccagccttttgcagcgcggagtggggcagccaacttaaaattccggtccaaagtcaatttgattagcaacattttccatggctttcagcaaatgcctcacctaaggccaattaaagcggccagctcggcaaattttggcaatgtttcaggtccccttcaacccgttagtggtttaattctataccgaaaaagcaccgatttctccatttgaccccaacacttcgagcttctacagtgctttctcctcgtcggtggcttgtcaagcgattaatttttaaatcaagtgccccttaatggtctcccggcgccaaatgaaaagttgtttttgtgaaaggcgctaggagcgaaggaaccaaggagctcattacacggatattgcctatgggccagcacacttgggttggtctagttcaatgtaaggttgctgaatttgctgaatctccaaggactcggattgaagcagttaaaggcaaaatttggagtgaattagaaaaacacaaggattacttaattaattatgggaatgcttgttcagttgtagtgtatgtgtatgtttttatctaaaaactggagtaggaactggcacaaagcagtcgtcatatcagcactttcagtgcctaccccaatttcaactggatgataaggctccaaaaagcaaactataaatcccgaccgtgtgggtgtattacgtcctaacttaatgatatatgtgcgtatactttggacaaaaatgaactgaatgtggggcttggtaaattgtttgcctcgaaaaaacctgggggcatgagtaattatgaatgagattcaaaaggtatctccacagagagaaactagtggatgaaaatcggaaaacaagcttaatgttccataagacagaagccaagtgagctcaaatcagaagggtttagcatattttccattcaacttcacgagttcagcaacaaagatcaactattttctgacgagaataattcattccgattcggattgtcagtggtccggatgattatgacaaactttcgacatgccgttgcctttaaagtatttccacaaagttgggctcgggaattttcccctttttcggctttttttttcgtgctgaggaaattgcacgagagccgaggcaaaaaaatgaaagaaattctttcagttcaaagaatacaaatccataaggcgagagagatacatactcgcatatttcacctagcagcatttacataaatacacgccccctttgccccgccccaccatctgacacacctcctcctcgagttcctgttcgtgtccgtgctgctattcctgttcgtgctactttgttgggatacacttggagaaaaatatatatatatgctagtcctcctagaaatccctacacattgctctaaacagaatctcattgatatttacaggttcgaaagttccttaaatacctcaagaaacattgctactacatttttacttcatgagatacaaattacaaagacttgtattggatttgttctcagtgcattcgcttggttctgggcgccaagcttttgttagcaattttttgagggatttaccggaatggcatcttcatcttgtaatcacgcgaaaagcccggctagaggcgcctcctttcgcggaaggactctaatgccttaatggcgctgccacacactcacacacacacttacacactcacactcatacacacatagactcacctatgagatggacggcgacggcggggggcatgacgaagatgcccacgagaaggtcggccaccgccaggctcatcacaaagcagttggtaatggtgcgaagccggcgagtggtcaatatggccagtatgaccagggtgttcccgatgacggtgaccacgatgaaggtggcaaagactgcaatcaggatgatgccctgccaggagagcaccagatcgtagaagtgcgcccattcggcggccgccgccgactcgttgtagtaattaaatgtggtcacgggcgccgtgggtccgggttcggtgagagccactgcatccgtaccgttcggtccgctgggatatccacctcctactcctcctactcctcctccacctgtcccattgcccgcatcctcatatacgatggatatgttttccggcagaccacccactcccactcccgatcccagtcccaatccccgcagggaggaggaggaggcagccacatacatgagcgacggataaatggcgcttaaattattcagctgcaagttgacagccatggatcggccagttgggttcacaatcgagtgtggctagctccggcagcaggccgcctaggcccatccatatcgtgccatatccctggagttgacggagcaggaacacggcccaactgtggtcattgtgtccagttgcacgtcgggttaactggaattaaaggaaagttcgacatttagcaaagtcctttgcatggtaataaaaacgaagtcaagaggaaacaataaccatttgcatatcccttttatgctgaaatctatttgtgtttgttttaattttttatgtatgcacgcattatctgatttattccttgtgacaatttccgaaattaaattgatttcacagcattccatacaatctcatttaaattgcaatcgtcgaaattgtcaatttcattcattcgcttgcaattaagcattcaacaatctcaaggcaaaaagtgcacagcattgaatatacccgtctgtgtaaattacgttgaaagttgtcaacggtgtcaaaagattcttaagatggcctttgtattgggttgccattaccgcgatacagttaaatactttactttctaagtagataaacgttaatcctttagttagtcatgctttcaacgaaaatgccgaagtgcgctactgtgagcaataaatcaaattaagtttaccttatcatctagaagcacccactggcttgatttaatttaaaatgtatgattccatttgctttggattaggtaccgaacttagagacttaagaataaataattcgtggaggtattttctatcagaaaattaaaaatttttatacaaatattcacggtttgatttggtgaagaaaattcaagaaaatcatcaacttcggaattcctggcgcattctaataatcattatatgaaaattacaaatataatgagctttatacaaagtaagcactattactacaaagtggcgaaatgtattaccaataaatttgccaagggaatggctacattttgggaatattttattt

SEQ ID NO: 83 - DNA, 1896 bp, Drosophila
atggctgtcaacttgcagctgaataatttaagcgccatttatccgtcgctcatgtatgtggctgcctcctcctcctccctgcggggattgggactgggatcgggagtgggagtgggtggtctgccggaaaacatatccatcgtatatgaggatgcgggcaatgggacaggtggaggaggagtaggaggagtaggaggtggatatcccagcggaccgaacggtacggatgcagtggctctcaccgaacccggacccacggcgcccgtgaccacatttaattactacaacgagtcggcggcggccgccgaatgggcgcacttctacgatctggtgctctcctggcagggcatcatcctgattgcagtctttgccaccttcatcgtggtcaccgtcatcgggaacaccctggtcatactggccatattgaccactcgccggcttcgcaccattaccaactgctttgtgatgagcctggcggtggccgaccttctcgtgggcatcttcgtcatgccccccgccgtcgccgtccatctcataggctcgtggcaactgggctgggtgctctgcgacatttggatctccctggacgtgctcctctgcacggcatccattctcagcctgtgcgccatcagtgtggacagatatttggccgtgaccagaccgctcacgtactcccgtaaacggcgctccaaacgattggccctcatcatgatcctaatcgtctggctgctcgcgttggccatcacctgtccccccatgctgggatggtacgagccaggacgaagggatctgcgcgagtgccgatacaaccagaacgagggctacgtcatcttctcggccatgggctccttcttcatacccatggcagtcatgatttatgtgtatgcaagaatttcctgtgtcattgcatccaggcacgacaatatgaccgacataagtgttcacaacaagaaattcaagcgctacacggcagcggacgtggagaatgagctgtcggagcaggagcagcacagctcggtgggccagcgccagagacaggccacatcgcgaacgttctccaaccagacgatagccaaggagctccaagacatgatgctcagcgacagcgacaattgtgcggcgatgggcgctggaggagcaggtggtgggggtggaggagcaagtagtgccactggcggcacacactgtcaatccctgctggcccttccctccggcggagtaggtggctccatgggctgcgccaagaatgggtgctacgaactcacacgaccctcctcgctgaagcgcgcttccaccgcctcaacgaccattaccacaatgacgagtggcatgggcccaggcagtagtctcctggatgcgcaatggcagtcccagccgccgggccaaacgggccaggtgcagacccactccctatcgcagccaccgcgaacacacagctttaggcattcgcatggggagcgggaccgcgagagactgcgaagccatcaccaccatcctcattatcatcaccaggcgggcgtaaccacgacatcgactagcgggaacaccagtgccaacaccaacagtaaatcgctgtccaatcggattacgtcgctgaagaaggagaacaagaccactcaaaccctgagcattgtggtgggtggctttatcgcctgctggctgcccttctttatcaactatctgatcaccccgttcctggccgaacaccaggccagccaaatgctggccaaggccctcacctggctgggttggttcaatagcgccattaatcccttcatctacgccttctacagcgtcgacttccgggcggccttctggcgcctcacctgcaaacgcttcttcagcgccggccagaagccacagttccccacgaacaccatgtccatcaggcgatag

SEQ ID NO: 84 - protein, 631 aa, Drosophila
MAVNLQLNNLSAIYPSLMYVAASSSSLRGLGLGSGVGVGGLPENISIVYEDAGNGTGGGGVGGVGGGYPSGPNGTDAVALTEPGPTAPVTTFNYYNESAAAAEWAHFYDLVLSWQGIILIAVFATFIVVTVIGNTLVILAILTTRRLRTITNCFVMSLAVADLLVGIFVMPPAVAVHLIGSWQLGWVLCDIWISLDVLLCTASILSLCAISVDRYLAVTRPLTYSRKRRSKRLALIMILIVWLLALAITCPPMLGWYEPGRRDLRECRYNQNEGYVIFSAMGSFFIPMAVMIYVYARISCVIASRHDNMTDISVHNKKFKRYTAADVENELSEQEQHSSVGQRQRQATSRTFSNQTIAKELQDMMLSDSDNCAAMGAGGAGGGGGGASSATGGTHCQSLLALPSGGVGGSMGCAKNGCYELTRPSSLKRASTASTTITTMTSGMGPGSSLLDAQWQSQPPGQTGQVQTHSLSQPPRTHSFRHSHGERDRERLRSHHHHPHYHHQAGVTTTSTSGNTSANTNSKSLSNRITSLKKENKTTQTLSIVVGGFIACWLPFFINYLITPFLAEHQASQMLAKALTWLGWFNSAINPFIYAFYSVDFRAAFWRLTCKRFFSAGQKPQFPTNTMSIRR

SEQ ID NO: 85 - DNA, 3836 bp, Drosophila
gtgctcgacatttcgcttgcgtcccgtaaagaaattgtccaccacgatgacctcgtgcccctggaccatcagatcgtcgaccaagtgggagcccacgaagccagctcctccggtaattagtatgcgtttgcgattcttatagttcaggtatttaaccttcggatacttgcgcggtgtgctggtctggaggctacgaacttgttcctccaatctggccaaattctcccttgtgcgctggagttcggccttttgttctcgaataagagagctctgctcctcgtacgccatctgaaggctcctttgtagcggactttccgtgggcggccatttggcctgaacctcctcgacgccgggaacggaaacggcgacctttccgcttgggcagaagctggccattcggtaaaggtagaccaggagcaggaggagcagcgagatggctgcaacgatcttcagacgctttttggtggcagtcatcgtcggttatgggttgtgtactgcagggttccagtgcttatcagcaactgatatcgccacattgcattctcgttcggctttagaaactatataaacaatacaattgcgttatcaggaggtgccagagtggccagatggctcaaacggaatttctaaatggattaataatctaacgccagggaaaagctcccgcctaattttaaaatttacatcaaaagtatcgacaggcgaacattttgattttggattataaattataatgaattgataatgaattagacatttttgttggtgatcttccccagggacgaatatttttcgttttaacgataaaaggtcggaaattgccaaaaaatgagtttgaaaactaaatttgtttgagggctttcttaggctggtcagcagggactactttccgaataaagtgtttgcccaaacggctattgaaggctatttaaactgccaacgatgagcatcgatcgccagtcgggcaaagttcttagtgccaagtgttgtagtgctcagcatgaggcttccttgggtgattttctgtacagttctgcttttaatttttacgaacaactcaaatgcagatattcccgggtgcaactactacgacacggttgatatctcatacattgaaaggcaaaacgattcgtatttatatgatgacatcgaaattcctgctagcttaactggatactacgagttcaggcagtttggggacggttcgattacgccgattgaaaagcatttaagggcctgtgtttgcagcgtgcggccctgtattcgaatctgctgcccagccaagaactttttggccaacggaaaatgcgatgatggtctcaaagaggagctcgcccggttcaaaccctatatatacttcacatacatggacctacaggcacgagtaccactcaccgatatggctattatcagagatgagttctttgattgtgatgaaatgatttacatcagcgactttaactatttcttagaagaggttagcattcaaatcttcaataaatgtggacttatagtttggttccaggatggaaaattttgggttaccgttgacctcttcatggaaaaacaggactactgcttgtaccggcacaactttgattcggattttccaaagtccatgtggataatacgacaccgctgcacaagccacatatctcctggatccttagagagtaattcaattattatttataacaaaagtcatcaatatcgttttcatagctatatagaaagaaacgaaaataactccttattggtgtgcaaactgctgactgcattctgtgtgccctttgcaagttttttaattacaataagctggttttttatttcttatattttctttttcagttctaattataacaatgatatgctttgtcctaacaatcgcagtatatctatacattaagaagctgcgaaatgttactggcaagtgcattgtatgctgtatagtttcgaggtttatccagtgcttgatcatgatactagatcatttaaatctattgaatggcatttgctctccagctggttagttcgaattggagatatctctggaagctttaaatgttatatcgttgacttcttgcaggttacagctcgcactttttccggatggcttccaacctctggctctccgtcatcagctaccatacgtggaaagtcttgacgtcgctcaatcgagtcgaccctaactatcggttcctgcggtacaacgccttcgtctggagcacagccgcaatcatgacgggaagtatttatatagttaatcagatttgggaaaacgatcccagtaaatggaactggttgcctctggtcggttttattcggtgctcggtcaaaggtaaactttcaatgcgattgcttttaaatcgttaccatggttacgtattgcttttccatatcagattggcacccatccgtctggatctatataagtggaccgtcgctggccctgagcactttcaatgtcgccatgttcgccctgacagccatttacattaggaaagtgaaggggggtataaataagttcacaaatgaggaggagggaaggattaactgcataaactttgacagccagacgtaagatatgataaaaccttggaccttggtaaactagttatccttgccgtattatccacatagttacctacagttcctgcggctctccatcgtgatgggccttacttggatattcaatgtcattccgtattctgcacggctccacattttctgggaatgggtcgggataatatccgagtattttcacagcgcgtttggaattgttttgttcgttctgctcgtcctgaagcgcagcacatggactctaatgatggattcttaagcttgtttctatataattctaataattgtttacaattaaagctttaaacaattaaagcccctcattttattaatatcctttgctgaacgaaggaattgaattgaattttattgaactcaataaataaatatagttttagaaaacgatgtactttaaactgccaagaggtcaccgcgacaagcttttcacttcgccaccctctggtaacactgattctccagccactttcgattctttaaaaaacatcgataggtatcgccaaaaaaatcagctgctctgcttgtagttttgcgatttcattgcaattttaatttgctttactgttcaaaaagaaatacagtgcaaaatatgccgaacgaaaacgcagaggacctctcgggtcaagagctaaagcagaaggccaaggaggtggccgacgcatcggaggcaatgctcgaaaaggttgttgccggcttaaatatccaggacacggcatcgacgaatgcagcaggaaacgaggatgcggagcagcctgatggtgccaagaatgaggcttcagtgtctgcgaatgcaagtaagttttcaatatgcctgtgaaaagtcatttagaggctcctcctgcggctgaaaaaatgaggttaggttttgtcgggaactacagtccaacctctctaacttgaactgctgtgctattcatttcaattcaattttcaattttcattttctgtgcaattactccaaagattagccctaacggaaaaataaacaactcataaatcataaatacatatttgattttgatgaaatatgaatatacttacatagatacaattgagttttttattacgaataaaatatgtgtaatataagatttctaccttgttgattccattgattgatgcttcattgaaaccccaaaattgggcaaatttgttgtcatgggaaactagtccactgtcgtgatgccttaagctttttttggggcagattagtcattccagtttaaactaatcgaaaa

SEQ ID NO: 86 - DNA, 1536 bp, Drosophila
atgaggcttccttgggtgattttctgtacagttctgcttttaatttttacgaacaactcaaatgcagatattcccgggtgcaactactacgacacggttgatatctcatacattgaaaggcaaaacgattcgtatttatatgatgacatcgaaattcctgctagcttaactggatactacgagttcaggcagtttggggacggttcgattacgccgattgaaaagcatttaagggcctgtgtttgcagcgtgcggccctgtattcgaatctgctgcccagccaagaactttttggccaacggaaaatgcgatgatggtctcaaagaggagctcgcccggttcaaaccctatatatacttcacatacatggacctacaggcacgagtaccactcaccgatatggctattatcagagatgagttctttgattgtgatgaaatgatttacatcagcgactttaactatttcttagaagaggttagcattcaaatcttcaataaatgtggacttatagtttggttccaggatggaaaattttgggttaccgttgacctcttcatggaaaaacaggactactgcttgtaccggcacaactttgattcggattttccaaagtccatgtggataatacgacaccgctgcacaagccacatatctcctggatccttagagattctaattataacaatgatatgctttgtcctaacaatcgcagtatatctatacattaagaagctgcgaaatgttactggcaagtgcattgtatgctgtatagtttcgaggtttatccagtgcttgatcatgatactagatcatttaaatctattgaatggcatttgctctccagctggttacagctcgcactttttccggatggcttccaacctctggctctccgtcatcagctaccatacgtggaaagtcttgacgtcgctcaatcgagtcgaccctaactatcggttcctgcggtacaacgccttcgtctggagcacagccgcaatcatgacgggaagtatttatatagttaatcagatttgggaaaacgatcccagtaaatggaactggttgcctctggtcggttttattcggtgctcggtcaaagattggcacccatccgtctggatctatataagtggaccgtcgctggccctgagcactttcaatgtcgccatgttcgccctgacagccatttacattaggaaagtgaaggggggtataaataagttcacaaatgaggaggagggaaggattaactgcataaactttgacagccagacgtaagatatgataaaaccttggaccttggtaaactagttatccttgccgtattatccacatagttacctacagttcctgcggctctccatcgtgatgggccttacttggatattcaatgtcattccgtattctgcacggctccacattttctgggaatgggtcgggataatatccgagtattttcacagcgcgtttggaattgttttgttcgttctgctcgtcctgaagcgcagcacatggactctaatgatggattct

SEQ ID NO: 87 - protein, 426 aa, Drosophila
MRLPWVIFCTVLLLIFTNNSNADIPGCNYYDTVDISYIERQNDSYLYDDIEIPASLTGYYEFRQFGDGSITPIEKHLRACVCSVRPCIRICCPAKNFLANGKCDDGLKEELARFKPYIYFTYMDLQARVPLTDMAIIRDEFFDCDEMIYISDFNYFLEEVSIQIFNKCGLIVWFQDGKFWVTVDLFMEKQDYCLYRHNFDSDFPKSMWIIRHRCTSHISPGSLEILIITMICFVLTIAVYLYIKKLRNVTGKCIVCCIVSRFIQCLIMILDHLNLLNGICSPAGYSSHFFRMASNLWLSVISYHTWKVLTSLNRVDPNYRFLRYNAFVWSTAAIMTGSIYIVNQIWENDPSKWNWLPLVGFIRCSVKDWHPSVWIYISGPSLALSTFNVAMFALTAIYIRKVKGGINKFTNEEEGRINCINFDSQT

SEQ ID NO: 88 - DNA, 6238 bp, Drosophila
tgaacctgcaccaccagccaagaccccagccaagactccgaccaaggcagctgctccagccgctgttgccagtcccgcagctgcggcaacgtcggcagacgcctctccatctccggccaagaaggcaacgcctgctcgcgctgccgccggagccaaggccacgccgcagcgacaacgcgcccgcggtcgctacaatcgctactaagtagacgtcgaaggaattcgtaatttaacataacataaaccttaatatacaagaaaaaatttacattcacgcccaggaggaggatgaagaaagaacagatcaaatcgatctcttcccgcaatttgacatttgcatcccaatttgcatatacactgaatgaatggaaactgagaagaagacggtcaacttttagttgaaacagttgaatatattgtacgacgaagcttcttgaaactgacgagggagaacacaaacaagttaattgaatcgagaatcgtattacctacccgattcccccctcacagaacgcataccatgccagccagcgaaccaaccattcaacttatgtaatcatataaattctataataaacaaagaaacaaaactagttgtaaaacaaacacgattcctgtgtgtcattgcgggatatggaaattggctttcaatctgttgcaaaatgagattcagtagcagtgtatatatctatgagggctgtacgatttcgttttagcgcacaattaatacatttaatacttgatctttttacacaagcgttatatttaatgctacaaatcggtacagagattaagtgaggtgagaatacatacatataaggaaagccttgatatagtaagatacgaagtgggatatatttattatttacagcttacgagactaggcgctactcccaggaatgctccgagggaggcggaaacgcttttttgagtgagatcccactgagtcgggaaatgggattaagtacttgggggcgcgcggtatgaagatcgagtggaatcagttgaattccagagtattcgcctccgtcatcgtcgtacgcatgcggctctggtcgctctgggaacgacgaagtccgcccggacgccatccgctcctccagcgcttaatgcatcccagcaaggaccagttgatggacttggagcgactcagcacatagacatacggatccgaggtgaagtgcagcgccgtaagaacatcggcgatgatgaagaacttgttcgatgcgggcacccgatttggagctatagccaacgggatggcgatctaaaacggagataattgttgataaaggccatgtaaatttattatattatattagatttgcataatacggaatggttgaagatactagacgtttagtagttactatctgcaaatttagaatggtatccacccagtactcaccatctgtggcatccagcagatgacgaacgagatgctgaggaacgccattagtttggcgaacttgatctcgactggcgaggagtcggtggccgccattgtgacgctaacgctgtgcctgtactgccttgccggctgtacactgcgatggctgtttccgcttccggtgctcagctgcgtctggtagagggtggtgccgctgctgctctcgggatcgatgctgatggcactgtttttgtccctggaaaccaggtcgtagtgcatatgccgcttggccgtgcgactccttccgatcacacagagcaaggtgtgggccacgaagaggttgcaggccacgattacaatgcacagcagggtacctggaatacatcgatggtcaaaccaatatttgaaatgtaaccaatttgataggaacttaccgaagaccataaagagcaccgcatacgtcttgttccacacgcccggcgcatcgcgatatcgtatacacttaagctggtccggattggattcatcgatgtatgcaccaaaaccaacgaatggcaggaacgtgatcaccacggcgatcatcagaatgctgttgatgctcttgcgaatgagctcgtaggtaatgtgctatggcgagagagatttgtgaatatttaatgaatgagttggcaatgtttgtgatttcctgtgtgcacttgtatcatttcttaaaattaaattacactaagaataaaatgcatagaaaatgttatttattatacatatattgcaatcaagttcataccttgtggtagataaagggtctggctagggccatccatctttctgccgccataactgctgcaatgcatccagaactgagcccgaaaaatcgccaaaccacgagtcccacgcaatccactcggatgaacgactgcaggacttcctttgagagatacattttcagcagcgtcgtggtcagcatgcccagtagagccaccagattgttggtcgccaggcatctgaaatagttgagagctccgtaaatttcggatagcttagctttatggcatttcgaagctcataaatcggaaagtaaatgcttttccttgccattagcgcccaaattgcctacagttcgttgggttctttaataagctacgaatataagttgggtataagatcgataaaatgtaataacgaattgcttttaattaattgccacttttataaaccgaaactttcaatcaagatacctcaaagctgctccatatggttgtacaactatcgattttggttatctaagacgtgactcggtccttaaacgctttgattcgaacgccgaccaatagcaatgaataattattttggttcgcaaaatgctcaattataaaaaggaaatatctattatatggatatttaaaaatttaattcatttttttgaatgtttatattataaaggatgctcctcaaatttctccattgaatattgtgtatattcactttatattcgttcatatatttaacatttgtatatttatactaatataaactaaagtacagatccctgtatttttatctacttagtgaaatatgtgactgtcaatggtgacttagattaagtgtttccttttattggtatcataaaatattgcatttgtggggcacgaatgtgtttcgatttgattgtttttggggcgccgttgacacaggaaactcatttgtctccgtgtgaaatgaaactatatgaatgtagggcttttttccaatggaaatatatgtatatatatataaaacacacgcttggaatagaacacaaaaatgggattgacaattcccggggattggcctaacagtccgtgcatcgttaggcatcgcaatgactttattcatttttgttttcattatttgtttgtgcacattgcacctttatacctgatttcagcgaacaagcgattaaaatgcattttatggtgcattgtaaaagtttcgccaaaagctaaaatgtcggaactgttcattacagggctaaaatgtctaaatcttcaattcgacgatttgcagtgcgaaatgcaaaatcgttttgctaacttgtaaaggcaaaatcattgtttactctagcaacgggaaaatacacacagctattccgcttttcgttcatagtcaaaaagcatgaagggataccctgatttatcgacaccgctcaagtgccattcaccagcttcattcaatcaatcaaattacagatcaaaggctctgcatgaaggaggcctgatgcctgaagtggaattcgcgttaatttatgcttccttgacggctcaaattgctggcgacagcaatttacgcatattacgcatacgcactgtcgtctcagcaaaaaaaaaatgttgggaaaggagcaaatcgcaaacaagctcactgaattcgccatgggccaatgctgataaatgtaatataaattgtgacaaatatttggcttatgaactaaaagaatttccgtgtgtgtcatagattttatcacttctttacagtacacaccctaccgaatgattaacacgatgtttaaaatatcaacaaagtctattatgagtattcgtattgagaagcgaatattttacaagaaattattattattatattaatattaaaaggaatttggtgaaatacacaagttttatttcactcatatttacaaaggaatagattatcatttttgagtattattatatctaccagttttttgcacctaagcaaagttaatttaaatacatattcatataaatcttttccccagtatgcacatttgccaatcaagtcaaccaccgatcgccgtcttcagttacaccataaagcttttaatgcattcgcaattggctgcattcccacgtcgccgataagattgacagaaaacagactggaatatggaatatggacaaaatctcaatgcccaaaacacatggccaacgaactaattccgtcatttgataagatatgcaaaaataaaacagcaaaaaccatgccaagcaaaacaattcaaactatgcaaatcagacccgcatagacatattatagagcaccaaagtggccgcagttgagagcaggttgaataaacttacatagccatgaactggacacaaacagtggcaaacattaactgcatgaaatgagtagctacacgctgagaaaatatgcaaaatgtcagctcaataatattattaacaataatactatatggttttgcatgcttaatatttatgcaaatcaaatagaatttggtgaactacacaactataaattactactaagatgggtacattttgaaagattttagggcaagcaaaacctactttttgcattaatatattattatttccactatgcatagctgcacttaccgcagcatgagcgtgtatttgctgtttttgttgagcttcttgcgcgccaaaatgaaaagggccagcgaattgccaaaaacgcccagaaccatgataataacaccaataatcaggcgatttcgatttgcatagagcgctttcggaggcgccacagtagttgagttgtgcggcatcaacaggtcgagcacaggtgttgtggtttccattttgccggtatgataattgcgttcgattgcaggtgattcaggtgaaaatctaactggccgcaaacgatatttctttttcataaatgagcctgccgcaaaggcaaggcagctcgcaaatgcactggtagatggaaacccgtttcgatagccaaattgggacttttttcctaagacacttaattaatgattagcgcacgcgacacttgatcaaccaacgaccgaccaattcgaaggcgattcgattcgatccgaggagcgcgtccgcagtcagccaggcgtcgatttagaatgactgccgaccgtgccgagcagagcactcgtcggctgctgcccatagctccaagctatccaagccatcatatacacgtgggggtggtggtaggggccagttcggagcgaggccagttcggctggcgccgccgccggtcggatcgcatcggatgtagcatacagcacatagacacccccaagcgaagcggccacccacatccacgcccagcgatggcgaccaccccatcgaaaattcacagctcgtgccagcgcctttgccttttggacgtgtgcgaacggtcggaatagcacgacgaattttattgttttatactctctccacctgcggctcactttaatttcactttcaactggatgtaatattaattatgcagtttttaagcttccatttgattttatacagttgactaaattagaataaaataatatactcaaaagtttacttcagcaatatatttactcatgtttctttgtcattgaaaaattaacaaaacaaaaaaacagctatttcatagatagattaattattattattaagagtcttcagattcgtcatctttagtatatggtgtgtcatttgaaaacctatttttgaggaatatatgaactgaaatctgcgtatactttaattactgtaatgtattaaagtattgtttcttttatacaaaaagtctaaaaatataagcaaacaaattattttactgaaaatttgttttttatgccacttttaagaaattttgcgaattaaacatatatttttaaagctaggagcctggtaattatagtagtttagctttaactctttgctgaaaatatttccaactaatttatttgttttcaacagaatgcattacgaaagataaaaattaaatttgcagttactaagcgttgcagttgcaccttttcttattcttatcttcttagtatatagtactgttttgttgggcaaaaatgtttattgtttagtttcaactgcc

SEQ ID NO: 89 - DNA, 1507 bp, Drosophila
actgcggacgcgctcctcggatcgaatcgaatcgccttcgaattggtcggtcgttggttgatcaagtgtcgcgtgcgctaatcattaattaagtgtcttaggaaaaaagtcccaatttggctatcgaaacgggtttccatctaccagtgcatttgcgagctgccttgcctttgcggcaggctcatttatgaaaaagaaatatcgtttgcggccagttagattttcacctgaatcacctgcaatcgaacgcaattatcataccggcaaaatggaaaccacaacacctgtgctcgacctgttgatgccgcacaactcaactactgtggcgcctccgaaagcgctctatgcaaatcgaaatcgcctgattattggtgttattatcatggttctgggcgtttttggcaattcgctggcccttttcattttggcgcgcaagaagctcaacaaaaacagcaaatacacgctcatgctgcgatgcctggcgaccaacaatctggtggctctactgggcatgctgaccacgacgctgctgaaaatgtatctctcaaaggaagtcctgcagtcgttcatccgagtggattgcgtgggactcgtggtttggcgatttttcgggctcagttctggatgcattgcagcagttatggcggcagaaagatggatggccctagccagaccctttatctaccacaagcacattacctacgagctcattcgcaagagcatcaacagcattctgatgatcgccgtggtgatcacgttcctgccattcgttggttttggtgcatacatcgatgaatccaatccggaccagcttaagtgtatacgatatcgcgatgcgccgggcgtgtggaacaagacgtatgcggtgctctttatggtcttcggtaccctgctgtgcattgtaatcgtggcctgcaacctcttcgtggcccacaccttgctctgtgtgatcggaaggagtcgcacggccaagcggcatatgcactacgacctggtttccagggacaaaaacagtgccatcagcatcgatcccgagagcagcagcggcaccaccctctaccagacgcagctgagcaccggaagcggaaacagccatcgcagtgtacagccggcaaggcagtacaggcacagcgttagcgtcacaatggcggccaccgactcctcgccagtcgagatcaagttcgccaaactaatggcgttcctcagcatctcgttcgtcatctgctggatgccacagatgatcgccatcccgttggctatagctccaaatcgggtgcccgcatcgaacaagttcttcatcatcgccgatgttcttacggcgctgcacttcacctcggatccgtatgtctatgtgctgagtcgctccaagtccatcaactggtccttgctgggatgcattaagcgctggaggagcggatggcgtccgggcggacttcgtcgttcccagagcgaccagagccgcatgcgtacgacgatgacggaggcgaatactctggaattcaactga

SEQ ID NO: 90 - protein, 412 aa, Drosophila
METTTPVLDLLMPHNSTTVAPPKALYANRNRLIIGVIIMVLGVFGNSLALFILARKKLNKNSKYTLMLRCLATNNLVALLGMLTTTLLKMYLSKEVLQSFIRVDCVGLVVWRFFGLSSGCIAAVMAAERWMALARPFIYHKHITYELIRKSINSILMIAVVITFLPFVGFGAYIDESNPDQLKCIRYRDAPGVWNKTYAVLFMVFGTLLCIVIVACNLFVAHTLLCVIGRSRTAKRHMHYDLVSRDKNSAISIDPESSSGTTLYQTQLSTGSGNSHRSVQPARQYRHSVSVTMAATDSSPVEIKFAKLMAFLSISFVICWMPQMIAIPLAIAPNRVPASNKFFIIADVLTALHFTSDPYVYVLSRSKSINWSLLGCIKRWRSGWRPGGLRRSQSDQSRMRTTMTEANTLEFN

SEQ ID NO: 91 - DNA, 5340 bp, Drosophila
tacactcatgaatattcaaacaaaactcttcaacttgtctggcatatatccatagacaattacgcgggtatgtatgctgggttttgtgttcttaaaatcgtatatctgctgcaggattgacatcgaactgcttaaccccacgacggcaaccattcgtcgaaaaagtttgaacacagtttatatttttgcaatattctaagtactataacctaccaaaataactgtaaaagaaagtttctatgaacgtttgaaatcaaaattaggtccgattttgcgtagttttcgacaaagtgtcaccgtcaaaagggcttcgactggcatatccctcaaagggttaacatgcttttctttggtcttcttatggcctacccccttcatatgtctgcttttcattgatatattctgcggaacaacaaaagaagtattattctatattgggatatgctttagagttttggtttgtagggttttctagtctcggtaaatgtgtatatcttatgcttaatttattttattagctatcatatcatatactttgcatggttatcatagattggttattaacattaaaatatttattgtctaaaacatttcgccccgcttagtgccactctagacctatgtatgcatcccaaatcggattgcttgttttcccccccaacgattctaactatagcacacacctttggctacttacagataactcttccctgtccaccgattaaattttgaatttaataagtgtttgattctaatactttgctgatggtcgaaatccagcagatattccattaagcggagcactttcgttgggtatgtatagaaaacttatgggcctaaggaggtgtaaggggtttgggaatggaaaagtttgcaaggcgccagactctcggggctctgaagtgtctggtcctttgcgcaagtgcagtgcaaaatggaaatctatcagggatttaactcaaccaccagcagcttaaccacttcagatccccaaaccatcttaggtcatgtgcagatcccccttgaggatccgcgtaaaggtcttcttgaactgctgattggccagagcgtagcaaaaaggattcatcgggctgttggcgtagcagaggaagtacgagaacatgtagaggtgttcattgatgcagggcggatgccggcagaatccctcgacgagggccaacacatggtagggtgtccagcaggccacgaagcagcccaaaatgaacgagatcgtgcgaaacgctttgcgagcacgattctccgacttggacttctgccgtccacccactccaaggatcaggggtagagccttcttgctcttgaagtgctttcctatcgaatgaatgaatgcccttttgctggagtttcggctggccgccaaactcttctcctccctgttggcatcgtcatcccccgcgttctttttggtggcaccaacaccgtcttgttccccgcctccacccacaccgcccgtactgctggtggtgcccgaggtggagggcatcttgttggtattactgtccgaggtttctcgctcctcaatcctttccagtggcaccggtggtgttacacccgccgccgactggggcgttcccgtttgtggcgttgaagtctttaccttgggtgagagtggcattggtggcatcggggaatagagtatggcatccttgctgctggtctccataggactggaggcccggcgatggggacagtccgcagctagctttccgggcacatccaacaggcagatggcctcaatgcagctctcccgcctcaccttagcaaagtcctcgattcctgtgtacgagacgagaagacgtttttcaatggccaccgcctcctcgatactctgactctgactctggttgtgattcggattcaggttgaggctcaggctttggctgggactctggttttggctgggagtttgactgaggctctggttcaggttcgattttggtggatttcggcgtgcgggcggtggtggaggcaggactggtggtttcccctggacgctgtcattcggggaggtcgtcgagttggccgtcacactggccagcatggcggagctctcgtccatatagcgtagctccgagttcgtcatcaggtcataggtcagggccagttcactgttaccggaactattcccaaagggacgatccgagtagtcatcggagagcggggtggggcactgaaaggcgtcgggaggtggcaaaatggtctgcaccagaccctgatgcacttgatcgctagggacctcgatgggtgccaagtccacgggggacaggggatcactggtgttgagtaatgttggaggagcggacaggtcgaccaaacgatcatgctcggctatctgggacagtgtggagcaggatgtgcgcttgggcctgtccagcggtgggttcggctggttttggtggtgctggtggtgcggttgttgctggttctggtggtggtgcagggagcgcatctcttccttgctctgcgcccgctgtaacggactctggttgtgatggtgctgttggtggtggtggtactggtgcatggcctcgatcgacttggagttagtggtgctcttctgcaagttacctttgccacgagtggccagcagggcggcctgtgccccaaagaccagaccaatcgatgaccgcttcctcatgttgttcaatttctgctgggtgatcaactgctgggcctggttgacggatgattcctcatcggaatcgaaggcaggactgctggatctctcgctcttttccgcatccacggctgcctcacgttttttcgcctcctcctggatttttgctgccgacgctctcctctgttccggtgtcatcttctccacttcctcggtggccacggccagaggatttgcctgaccggaaccacttaatctcttaatcactgtggtgcaggcactatccaaatcggtttgatctcccgcaagttccactttggtctttaggattttctcctcaatcacaccaatgccagctgcatgacctgccattccggacatcgctccagcactcagtgccaccatggattgcattttccgttgcttcgcctcactgcgcttttgcatatcataggctgttttgtagatcccggcatataagacaaaaagcacaattagtgtggtccaatagtagccaatgattagggccgtattaaagatcggatccttgagaaactgaacggcgcactggccaggaagtagatcccgcttgccggtgaagtgctcccatccaaaaatcgagatgaagaagagcagagcgggaatgatccaagtgattgtgaccatatatatcactctggttctcgtcctccaactccggtacttggcggcaatcttcacagagcagtagcgatctatcgtgatcaacagcaccgtgtactgggacaccagacacacagtatagtcgacggaaagccagagatcgcagagcatcggacccaggtcccaataacccttgagcacgtatatcgtgtagaagggcatcgaaacggttcctgaaatatgggtttatagtacaattaataattttttttttttgaatttaaggtaaaatagttactacctattagcatatccgtggctgctagggaggcaataaagtagttgctgggctgccgaatattcctgtccacgatgaaggccagtagcaccaggatattaccgcccaccgtaagaatgatacagatcgccaggcatatggctatcaggatcgtctgccacagtgcaaatggtggcaaaacaggaccaagaatctccgagtcggaactggatcccgacatggtggaaccgccatcagaggattgatttctaacagccaacagaaggttcgtattgttcacatcgaagttcctgtaccattgcagctgttcattaaccggccaggaattgaagtcactgctctcgccatagatcttggccgcctccaacagacgtttgcactccgtgtgcgtcaggactcgcttgaaaatgaagctgcacagcttatcccgctcccttctaaggctcctggaagtgcgaaagtaaatatatgcttaattagagttgacataaaactatctctatctctatctctatctctatctctatctctatctctaaactaatgtccttgaaaacaaattctaacaatgtatctttttaagatctccattttctaaaagctttgccactgaaattactattctaataggcgcctttattctattaagacaactcaccagtcggtgatccacttgttcttgatggtatagatggagtcgctggagttgccattcaggccagtcagctcctcctcgcccgccgacttgttaagcgaccgcatccttaaccgctccgccctcttcccgctctggccacgtcccgctccctgctccccgcacttcgcctctgcgctccacaacctctgcggtttttatggtaatttcaagttgttcctccttaatgtgctgtcgacggcggttgtctcggaatgcttacattgcctccatggaatgccaagacttgtctccggtcaggtgcagcatctgcaagaggcaacaaaagcagccacagtcttggttagcacttgaaaaaatatagaggttattaatattatatgatataatatatatatgcatataaaatatgatataatatatatatgcatataaaatatgatataatttatatatgtatacataatatgataaaaagtctgaatttcagaattctgccagaagtcgttttccatccaaaaattaattgttttttaatcgaatttttggtaataataatccgaataaggaatggaatatttcgttgagatcgtaaataaattttaaatccgtgtgtgtttgatttggaaccagtcgttttccatccaaaaattaattgttttttaatcgaatttttggtaataataatccgaataaggaatggaatatctcgttgagatcgtaaataaattttaaaatatatgtgtgtttgatttggaaccatttatttttttcacgatgttgccactttccaaaaattcgaaaattgacaaaaaaaatatttttccgttttagttgcgcgaccatttttagccaaataatagtaaaaaatctatttgaaaaatacattgtcttcattagatggtggaaaataatgaaaatatgaaaataatggaaattaaattaaatcaaaattagtaatgaaaatcaagtatttactaaataaagaaactttcttttcgtgtagtcttcgtggacgtcttcgcttccgccaagtttaaactaattttgcaaccgttaactggcaaccggcgactggcgatgcaatttgcttgtggcagttgcttc

SEQ ID NO: 92 - DNA, 3060 bp, Drosophila
atgcggtcgcttaacaagtcggcgggcgaggaggagctgactggcctgaatggcaactccagcgactccatctataccatcaagaacaagtggatcaccgactggagccttagaagggagcgggataagctgtgcagcttcattttcaagcgagtcctgacgcacacggagtgcaaacgtctgttggaggcggccaagatctatggcgagagcagtgacttcaattcctggccggttaatgaacagctgcaatggtacaggaacttcgatgtgaacaatacgaaccttctgttggctgttagaaatcaatcctctgatggcggttccaccatgtcgggatccagttccgactcggagattcttggtcctgttttgccaccatttgcactgtggcagacgatcctgatagccatatgcctggcgatctgtatcattcttacggtgggcggtaatatcctggtgctactggccttcatcgtggacaggaatattcggcagcccagcaactactttattgcctccctagcagccacggatatgctaataggaaccgtttcgatgcccttctacacgatatacgtgctcaagggttattgggacctgggtccgatgctctgcgatctctggctttccgtcgactatactgtgtgtctggtgtcccagtacacggtgctgttgatcacgatagatcgctactgctctgtgaagattgccgccaagtaccggagttggaggacgagaaccagagtgatatatatggtcacaatcacttggatcattcccgctctgctcttcttcatctcgatttttggatgggagcacttcaccggcaagcgggatctacttcctggccagtgcgccgttcagtttctcaaggatccgatctttaatacggccctaatcattggctactattggaccacactaattgtgctttttgtcttatatgccgggatctacaaaacagcctatgatatgcaaaagcgcagtgaggcgaagcaacggaaaatgcaatccatggtggcactgagtgctggagcgatgtccggaatggcaggtcatgcagctggcattggtgtgattgaggagaaaatcctaaagaccaaagtggaacttgcgggagatcaaaccgatttggatagtgcctgcaccacagtgattaagagattaagtggttccggtcaggcaaatcctctggccgtggccaccgaggaagtggagaagatgacaccggaacagaggagagcgtcggcagcaaaaatccaggaggaggcgaaaaaacgtgaggcagccgtggatgcggaaaagagcgagagatccagcagtcctgccttcgattccgatgaggaatcatccgtcaaccaggcccagcagttgatcacccagcagaaattgaacaacatgaggaagcggtcatcgattggtctggtctttggggcacaggccgccctgctggccactcgtggcaaaggtaacttgcagaagagcaccactaactccaagtcgatcgaggccatgcaccagtaccaccaccaccaacagcaccatcacaaccagagtccgttacagcgggcgcagagcaaggaagagatgcgctccctgcaccaccaccagaaccagcaacaaccgcaccaccagcaccaccaaaaccagccgaacccaccgctggacaggcccaagcgcacatcctgctccacactgtcccagatagccgagcatgatcgtttggtcgacctgtccgctcctccaacattactcaacaccagtgatcccctgtcccccgtggacttggcacccatcgaggtccctagcgatcaagtgcatcagggtctggtgcagaccattttgccacctcccgacgcctttcagtgccccaccccgctctccgatgactactcggatcgtccctttgggaatagttccggtaacagtgaactggccctgacctatgacctgatgacgaactcggagctacgctatatggacgagagctccgccatgctggccagtgtgacggccaactcgacgacctccccgaatgacagcgtccaggggaaaccaccagtcctgcctccaccaccgcccgcacgccgaaatccaccaaaatcgaacctgaaccagagcctcagtcaaactcccagccaaaaccagagtcccagccaaagcctgagcctcaacctgaatccgaatcacaaccagagtcagagtcagagtatcgaggaggcggtggccattgaaaaacgtcttctcgtctcgtacacaggaatcgaggactttgctaaggtgaggcgggagagctgcattgaggccatctgcctgttggatgtgcccggaaagctagctgcggactgtccccatcgccgggcctccagtcctatggagaccagcagcaaggatgccatactctattccccgatgccaccaatgccactctcacccaaggtaaagacttcaacgccacaaacgggaacgccccagtcggcggcgggtgtaacaccaccggtgccactggaaaggattgaggagcgagaaacctcggacagtaataccaacaagatgccctccacctcgggcaccaccagcagtacgggcggtgtgggtggaggcggggaacaagacggtgttggtgccaccaaaaagaacgcgggggatgacgatgccaacagggaggagaagagtttggcggccagccgaaactccagcaaaagggcattcattcattcgataggaaagcacttcaagagcaagaaggctctacccctgatccttggagtgggtggacggcagaagtccaagtcggagaatcgtgctcgcaaagcgtttcgcacgatctcgttcattttgggctgcttcgtggcctgctggacaccctaccatgtgttggccctcgtcgagggattctgccggcatccgccctgcatcaatgaacacctctacatgttctcgtacttcctctgctacgccaacagcccgatgaatcctttttgctacgctctggccaatcagcagttcaagaagacctttacgcggatcctcaagggggatctgcacatgacctaa

SEQ ID NO: 93 - protein, 1019 aa, Drosophila
MRSLNKSAGEEELTGLNGNSSDSIYTIKNKWITDWSLRRERDKLCSFIFKRVLTHTECKRLLEAAKIYGESSDFNSWPVNEQLQWYRNFDVNNTNLLLAVRNQSSDGGSTMSGSSSDSEILGPVLPPFALWQTILIAICLAICIILTVGGNILVLLAFIVDRNIRQPSNYFIASLAATDMLIGTVSMPFYTIYVLKGYWDLGPMLCDLWLSVDYTVCLVSQYTVLLITIDRYCSVKIAAKYRSWRTRTRVIYMVTITWIIPALLFFISIFGWEHFTGKRDLLPGQCAVQFLKDPIFNTALIIGYYWTTLIVLFVLYAGIYKTAYDMQKRSEAKQRKMQSMVALSAGAMSGMAGHAAGIGVIEEKILKTKVELAGDQTDLDSACTTVIKRLSGSGQANPLAVATEEVEKMTPEQRRASAAKIQEEAKKREAAVDAEKSERSSSPAFDSDEESSVNQAQQLITQQKLNNMRKRSSIGLVFGAQAALLATRGKGNLQKSTTNSKSIEAMHQYHHHQQHHHNQSPLQRAQSKEEMRSLHHHQNQQQPHHQHHQNQPNPPLDRPKRTSCSTLSQIAEHDRLVDLSAPPTLLNTSDPLSPVDLAPIEVPSDQVHQGLVQTILPPPDAFQCPTPLSDDYSDRPFGNSSGNSELALTYDLMTNSELRYMDESSAMLASVTANSTTSPNDSVQGKPPVLPPPPPARRNPPKSNLNQSLSQTPSQNQSPSQSLSLNLNPNHNQSQSQSIEEAVAIEKRLLVSYTGIEDFAKVRRESCIEAICLLDVPGKLAADCPHRRASSPMETSSKDAILYSPMPPMPLSPKVKTSTPQTGTPQSAAGVTPPVPLERIEERETSDSNTNKMPSTSGTTSSTGGVGGGGEQDGVGATKKNAGDDDANREEKSLAASRNSSKRAFIHSIGKHFKSKKALPLILGVGGRQKSKSENRARKAFRTISFILGCFVACWTPYHVLALVEGFCRHPPCINEHLYMFSYFLCYANSPMNPFCYALANQQFKKTFTRILKGDLHMT

SEQ ID NO: 94 - DNA, 4172 bp, Drosophila
gacatacgcaggcggagaattgatttgatttctgttattgttgcttatcactatcgatttcgattattcaaagtccctttttgccctgcggcgaacggcgattgccctcagtttctgagttcctgcaaatcaaatgcaattatgtcgttcaatcgtctgaatgctgaacggtaaatcgagtaaacaagagtgggcggaggtggtctgaataatttatgaccgcccattaattattactcatagagctgtcctatgacttatcgactttaagccaattggagaggggggagtaaggctggcagggcaacccgatcaaaacgaaaaatcaaagtgtgggtatcattgtgtatttcgtaaattagaaggccaatttggtggcaattcctgtttgtgatacaattcctggccgccattgtacccgtggtacttctaggaattcattaaatgtatccaatttgctgtcaaggtaatttacttggtgaacaattaagttcaagtagctatgtttagtcatttcaaagttatgtctttacaatttattttatataaatactaagtgctattcttaattaagcatctgcacttaaggttttctctataaggagcctattcaaatagttttcattaatgttttcattctttccctttctcgattgcagctccaacttccggcgctttggtggcgtaaaatgtttgccaccaatatccgttcggttgccgtagaaatcgtcctggtggcgccgtgagctctcgtccttttcctttcgcgagtcctgaatccccgtccctcgctcatttccggtgcgccgtttttacatttgcaattcgaatcggattgaaatcggaatcggaatcagaatcggcgcgaggacatttccattccttcccattctctttttattttttttttttgcgatctgcgttgcatatgcgagggctaattagcatgcggcatttccagcaatcagagtagagcgcacaataggaataataacgcggaatggaagaggatgtgtatgcctcgctaggtgcctacaacgacagcggtggcgacgattggagcagctcggagcacctggtcctgtgggaggaggatgagacgcagcgaacgactgctaatgccaccagtcggcataatcaactgcatgtggccaggtggaatgccaccggcaatgcgaccatcagcgcgaccttcgaggacgtacccttcgatgcgaacaactactgggccctattggccctcgtcctcgtcctgggaacagcggccgggaacatccttgtctgcctggccatcgcctgggagcgccggctgcagaatgtgaccaactacttccttatgtcgctggccatcaccgatctcatggtcgccgtgctggtcatgccgctgggcatccttacgctggtgaaaggtgagtcctttgtcccattcaaagtccggaacagaggtattttttgcagccaccttttgttgagggactcaatggacacttgagtaagtcacttgtgcgccaggattggcttgtgcggctaatcttagttggaaaagttccttttccataatttcatagtttactctaacgaaaatgagttggtggaaaacttgatgaaaattaatattaattacttggggcaagggaaaaaagagtgagaagttttgatagttgttaaatttttaaggcttttaaaaagtgacgaagaagatgcaaggaaacgcaaagatgtagggaatatacaaaattattttaaatcttaagatttcttatatttgcaatttaaatgcggtaaatgcgaatcaattgaataatgtacagggaattgtgaaaaaatatggatatttacggattccttttgctgcaactcaatccgaatgataatctctccaagtggaagagtataataatcaaagccagcgacagaaacgtggcaaagacattcaggccaggacctcctgcgatgtcgccaacacgaggcacgagttgcatttaatgaagctgctggtgggaatggcgttggcggtgtgcagattgcattatgtctcagatatttcgatcaaagctggcaaacgtaagtaagcccggatagaaaaatggaatcgctggtgtctatgggccggcagggcggagcggagctccatcgttagacaatttaataagcgcggcgcctttgtagccagcctggccaggacgaaccgctggcgcagacagggaagcccagaaacaatgccagcaagatggcaacggaagcttccaaagcctttgcaggcgccggagcaactgcagcataagaattgcattaggggcggcaaacgagcgctggtgaatttcgctttgacttagttcggatctggaaacatctgccgacacattgctgtcctgcaatctgcactgaaaaaaaaaacaaaatatatttattcaattatttctatacttaaagtaaaagtcatcaagtttaaagctaattgtataatttttttctttcgattttttcgattgagcaataaaatatggttcatatatgttaatacttacattttttttaagctaagtaacttgaagctagctacacaaatattataacataccagacaggaaatggaaaagctatttccgtgactttcaaaggcgttgcttatttcgttgctccatttatgtgagtgcttcttccggtggcagttaaacggtatttcttcgattttcgaaaacgaatggctgatttgaggactgcatttatctgagtgctgcttccgcctcctgctgccgtcctttttgtgccaacccctgcagatgttgcaacactgatgacagttttgtttgtgcgctttgggagccattacaaacacaaacacaaacacaaacacgagcacgggcaccaatacaagcagaaagggcgacgcacacacacgcaaacacacacctggagcaatccttggcaaagtgggcaatgtagcaagaaggaggaccaacaaatggctgcttgttatatcaagtgtgaaaaatattgcagtggcagtgacaggagcagttgttgctgtagttgcacgggcacacgcccgccaactggaggcaagaaaggacgaaatcgggatttgcctgctgtcaagggctttgcagagggtcctgcgacagaagctgaaatctccagcgaacagcaggcattagatcccaaggattaagctcttacaattcaaaggcacaatggcgcaagtagcaactggatatgagtaagccgtgcagtacattaattgcatcggttacgtaagtaacatgtggcatacaatgtggcattgaaatggcctatatattctattctctgttgataagtatgcaaattcaactttcaatgaaagctgaactaatatgttcatgaccaataggcgtatgagtaatattagtagactaaatgtttaaaaacgctaaaggtgtaatatcaaaattaatctaacaaaatcattcatggctttggttgttgactttctggagtgtaataataatacaaatttaaattttcgtaaaaacaatttgatccgtacgtacacgcacaaatctaacaaactattgaaatggaatcaaatagctgaaataatatttataaatgaatatatatttttaggacttaagttcactgaaggcttagcgggaaataagtttttaaggatgaaatattaatgctattatgctaaactctgttgagtttccagatgcatatatcctttgattttgaactttcaacgaattttccacttgatcaatcgaccttttggaaacgaaacaagacccatgcaattaaacgacatgcgttgatgccattttaagcgcttgcacttgcagtgaattatgattacgcgtggaaaacataattaatgcataattaatttcattttaaaatcagcattaaacgccagttaattaataacagtaaacgcaattactgcatagcatagccatcaaaagccataaaaaagacagtaaattgaattacaacgtcccgtcaatggtcgtgaatatttaagtaaacgcgaaaagctcgcaaatgtttgcaacttaataaattatacttgggacgaataatgataaacaagagaacagccgcaaatataaaaagaaaagccaagcgaaaaaaggcgcgaggcacgagaagctggaaaattaattgagcgcaaattggtgaagctg

SEQ ID NO: 95 - DNA, 1014 bp, Drosophila
atggaagaggatgtgtatgcctcgctaggtgcctacaacgacagcggtggcgacgattggagcagctcggagcacctggtcctgtgggaggaggatgagacgcagcgaacgactgctaatgccaccagtcggcataatcaactgcatgtggccaggtggaatgccaccggcaatgcgaccatcagcgcgaccttcgaggacgtacccttcgatgcgaacaactactgggccctattggccctcgtcctcgtcctgggaacagcggccgggaacatccttgtctgcctggccatcgcctgggagcgccggctgcagaatgtgaccaactacttccttatgtcgctggccatcaccgatctcatggtcgccgtgctggtcatgccgctgggcatccttacgctggtgaaaggtgagtcctttgtcccattcaaagtccggaacagagtggaagagtataataatcaaagccagcgacagaaacgtggcaaagacattcaggccaggacctcctgcgatgtcgccaacacgaggcacgagttgcatttaatgaagctgctggtgggaatggcgttggcggtgtgcagattgcattatgtctcagatatttcgatcaaagctggcaaacatgttgcaacactgatgacagttttgtttgtgcgctttgggagccattacaaacacaaacacaaacacaaacacgagcacgggcaccaatacaagcagaaagggcgacgcacacacacgcaaacacacacctggagcaatccttggcaaagtgggcaatgtagcaagaaggaggaccaacaaatggctgcttgttatatcaagtgtgaaaaatattgcagtggcagtgacaggagcagttgttgctgtagttgcacgggcacacgcccgccaactggaggcaagaaaggacgaaatcgggatttgcctgctgtcaagggctttgcagagggtcctgcgacagaagctgaaatctccagcgaacagcaggcattagatcccaaggattaa

SEQ ID NO: 96 - protein, 337 aa, Drosophila
MEEDVYASLGAYNDSGGDDWSSSEHLVLWEEDETQRTTANATSRHNQLHVARWNATGNATISATFEDVPFDANNYWALLALVLVLGTAAGNILVCLAIAWERRLQNVTNYFLMSLAITDLMVAVLVMPLGILTLVKGESFVPFKVRNRVEEYNNQSQRQKRGKDIQARTSCDVANTRHELHLMKLLVGMALAVCRLHYVSDISIKAGKHVATLMTVLFVRFGSHYKHKHKHKHEHGHQYKQKGRRTHTQTHTWSNPWQSGQCSKKEDQQMAACYIKCEKYCSGSDRSSCCCSCTGTRPPTGGKKGRNRDLPAVKGFAEGPATEAEISSEQQALDPKD

SEQ ID NO: 97 - DNA, 9268 bp, Drosophila
tataaatgaattctgaaaaatgtataaaatgaaatggactcatcattaggtcaatttgtttggaatcaaaaatttcccaaagaaatggttttacatttcagaaagtgacccttaattttcgccatcaatatttattagaacattgaccttaaagcaatttgtatagtcgtcactttaacagatcaaagttatacttaaagtcgtgcagttgcaactgaaactgattcattctacgccttatcgatccatcttcccccgaacttatcccaatttctgttggctatctcgttaggaaattccttttcccagcggccatacggattcatgttcgaccagattctggattcacaaatcccgcgcccaaatctcagggcacacgcaacaacacagtaaacacaagtatcactcaccgaatgtgtgggagattctcggccacacaagctacagagaaacaaacccaattcaaactaaaaatttctaaatggaaaataaattaattttattagttctttataagatactaagacttatactagttggaaatcttctaggcatggtttgtaaatcatccttatatctttcgatattattctaagacttttttcgtagtgcacacacaattgtatttttatgggaatagggcgagagtggtgcgctgagttatgacgtccaacagctgtgcaaaacgatggccacagcatcgggaatagccgctcatatgtgggccagttggcctgaaatatgttgcataagctcccccctcttggcaatatcatttggcagctcacgaatgaactgtggctcccgggaaaatatggccaaaaaaaataaaaaaaaaaaggcggggagtattaaataaaaatggctagagaacattgcattgtttgccgccgaccaagccaatcgtaaatcgtgtgtacacataggtagaaagtattgcagccacttaatacagtcataagtcggccatggaacatttacaagctgaccaagaaatacaatgaagaatcggttttttttttcttttacaggctactttcctttgggctcggagcactgcctcacctggatctgcctggatgtactcttctgcacggccagcatcatgcacctgtgcaccatctccgtggacagatatttatcgctacgatacccaatgcgatttggccggaataaaacacgtcggcgggtcactctcaaaattgttttcgtttggcttctgagcatcgccatgagcttgcccttgagcttgatgtactccaaggtgagtaataatgctattcttttgtttatattctatattccaacaatgcgtcaaaatatagtacccttttggcattctatttcccttaatctaatagtgaaaacccattaaattccctagttaacctagtactcaaaatctaaagtgaaaattacaaacactgtgccaagtcaataattaaaatccaaagcgagacaagtgtctgaaatattttgcgcatacatatgtcctttacttacccaaattaattccgtgctcgccctgctatctttcctttgattccagaatcacgcctcggtgctggtgaatggaacttgccagataccggatccggtgtacaagctggtcggctccattgtatgcttctacattccactgggcgtgatgctgctgacatattgcctgaccgtccgacttttggcccggcagcgccagaatctgggtggtggacagcagacggcggcggccactcccggatgggccagtggatggctcggccaggcaccggccttgggtaaggatgctagacaccacacttctgacccccactctcacccagaagtgtccacgaagagctgctgcttctgctgcagcttaatatgattttcagtttgcctaaaatttgcattttgttctccggattgcactttttgcactgaaaactttacacgacactcgacaaaagtagagagtaggaaatgggcggatcaggatcagcaaggggaaagtgctcaaaagtggggaggggtgacaacactagacaaacaatgcagagacatgtgccggatactccccgaatccgtgtccctgggctttctggagcccaaagtgcgactaagccgcagcaatgcacacaaaatcgacattgtcgtcgacattgaaccggatggaatggggcgggggggggggggggccaacaccccaggacaatcacccattccacccacttgcacacacaaccttacaaataggatgaaaatccagcccatatgtgtagatagctaatttccacgttgccatgaatcgagggccagctacgtaaatggcttgtaatgctctaagagctcttccatagtgctcgactagttttaaaaccgaagttttaagcaccaacttttcaacgaagcctcgttacagccccgttgcgtagggtagtttttaaaaactcaagagctgcgttaacttttagttttattaaccactttttgaaatttccataacacttttcagcgcatctacaaaaaagaggaggaatctttaaacatgtagctaataaataaaaagtgaacagtctgttattttagatttaaagagtctaaattgcttcctgcatccctaattacccctctcgttactagcccagttaactggagcttttggctaaaaacaatccaagatccttcgcttccattatcccttcacaattcaatagaccagattcaatttattttaagcataactaagtggctcctaatgccattgtctgcccgcagaatttattcagcgctcccatttctcatccaattggattgccttgagccccaaaggggacagagagtaattttctgggggacaagctgtggatctctggatgttgaaagtcaatacagttggggaatatttaatggaatgcttctggtggtggcgaatggtgaatgctgaatggtaaatgctgatggtgatggtgactgcagtcgaatcgcgtgcactgcagggcatttttgcgaaaatcgtagcgtgcatttaggggcgattcgcaggacgcggtgtccccgattcgtctaagtggatttgaagcctcagctgcaggcattagggtgtgtatgtatgtatgtgtgggtgcgcatctgtgagcggccaagtgcgactgtgttagtgccgtggatttgggcagttattttaagccaaatctctgctgtaaagcgtccgcatttcggtcaggcacgtagtcggatttgccgtattgtactttttacacgcagagaaaaatcttcgcatttattacacaaagaatcaatgtgtctgattaatataagcaagatatttaatgcaagttagaatagcttcaagcactatttcataaggtctgaactggactaggagaagaatttctctcagtgcctatgttgaaggggcatttaagtgtgctcgtgcgagtttattagcgaatttgtgacttttcgtagcgcactattggactgaatgcaatttaatggaaactgtatatccgtttaaccccgtgttcgtgctccacagaacgacgatgcacctggcggcgccttttgaaaccgggtccaggtaacgcctcctcggtgctgcacgcacactcggccaattcaacggatacggatctcagcactttggacaaccacgagctctggctgcccgattccaggtgagctatcgagtttgcgagccagtgttgcagtgcaaattaccatatatattattcatgtttatgtagcataaaggagccaacgcccacgaccatgacggccttgcatcagttcggtgccgagatgctgaaactatcccgaggcctggagtcggtggcctcgtcatccaccaccggctcacccaccaaatccgaattttccctatcgaaccacctgcagctgcagtaccccagcagcccacagcgatatgccgccacccaccagcagtcccaccaccacaaccaccagcagcatccggccggagtttaccaccagcaggcatcgcccaaaggtcgccacggaaccacagttctgggtctgtccaccaccacgctgggcatcgagcgggagagcaccaggaattccctggccagcagtcgcatgggcggcgaacagagcgatgggtgagttcataaatagtaatataaataagtgagtccaaataatggggtctaaaaatatactatctaaaagtctggaagccaaccaaaattatggttacaattttctcaagatgtaatatgatgctcaaacataattaaattgcttcaccacttaaccagaatctctgttgtcacaaataatattaacacagacaattaaattcttttaactttatcccttttgcgggccacaattttcactagaattgtgtcaaatcccttgaaaagcatagacaattcgggcaggtaccttggaaaaacgtaaagttttcgtggctcttcacctgacaaaaggacaaacagctgcgatgggcaaaccgttttgccagagtgatcctttctagtcgctcgcaggaccttttgttgtcgctgtctcagccggttttcgagtgccagtactgcgcttggccaagtgtgctgaccacaccaaaagccaagaaaatgctcacctcgagtcctttttgtgactcgtttactttctccttttccatttatttagttttcttttttcgttagctcatttttgtggcattgccttttattgtccttccgccttcgacttgttgtgaaatttttcgtaataattaattttttttcgctacgttatcctttttctttgtgtcggtgcaaactgttttatttcttttttttggccaaaaggcagaggcactgcctttttatttggcattcgagccgctcaagtgattttggcgtcgactgaggccttttgccaaaatgtgtttttcattaatttcctaaatttagtctactggcttatgctgggataagtgatgcgacgagaaatttaattaaaaaattgagataatagaagacgaatatattttgaaattaccgagaatttaataagaactggaaacatggctaaactggcatattcaagtaaatagggcgcttcatgtttatgggcattcaggtggaactaatattaactatttaattgcgtatgatatgaaattctatggaagagcctggcaaattctaaaaatacttttattttaggcactcaacccaattcgatattgtacacgcattttattttgatttaattggttatcatatttagtctgcaaaatccatccaataaaagcatgaatttttcactgcaactgcgaacattgatatcttgaatcccccgttcgattttaagcttgaataaaaggcagctcaacttgcgaaatgactgcacattttatctcgctcatatttttcccatttaaccaatcccttatgcatgtttatatcatatatcattgtgactgtgcgcctttcagccaaatgcttggtattgggtattgggagcactatgtgccacattgtttgacagttgaacgaatttgcacaatcaataaaatggatttggctttggctccggcttcctattgtccgcaatggatgggatgccacttggcataaaggacgaaaagaaacgggacgaggtcaaagtcgagtggtttttaattgttgcacaatttgccgtctcatgcggcaaagttgacaaatgatgctggcgatattctaatttttgaacttggctgggagacttaaaatcagctcaacacttcgccacataagagtatatattatatgtatgtgtatgcgaaggcggtatcctgcgatgtcctgatgagcttggcagctgtttaattcctttgtgagggggaaacaataacaaagttggcatcagctcggctttgtttcacttgcataatgagtagctggccccaaataccacctccccactcccccattgcttagccctgttccaacgcatctcaatttatgcgcacgtctcgtgcaaacaaatcaaaaacgcgaaggatgcataatgagctgacatccttatcctgcgtcttggcagcaccgagcatcccgatccctgtcctccctgcagccaccaccacttggccttctgtctgctaacgccttcattagcagctaaccacgcccccaacgccaccgccccacaccgtcttggccaaataaagttggcgcgcatttgcatgcagggcaaaacgggcggcaggacagaaaaccgcaaaggcagctcgcaaatttatgcgctttattaaaatgaatgcaaaatgaggcggtacagaaaaaaaatcgatgtacaatatgtttatatataactttaaattaaagctacacatatgagctaagtatttctgcaattaataatataaaattaaaaaaaaaaaaaatcccgccagtaaagtacagtaagccgaactaacataccaaatataatatagtaaataataatgcaagaatttttcaagtgtaccacaaacaacggagcaagaaaaaatgttagaaggcggtaaaccacaaagagcaaacacaaaaaatgttgcctacttcccggcaaaacaggtgaaagaaacgagctgaccacaaagcgtgctggcttttgttcaattgccgttagcgagtgttcactgcattgttttaggcacctcaccttcgaatagagttttgccaattggctgcgcaattttaattaaaaatgtacgacgccgaaggggagaaggtgaaagaaaatggctcggcattgggtactaaatcaataaatcggtggggtatgacatagacatattttatatattttcattattaaaaccacatggttccttttgttctagtctgctttaatttgattcaggaaaatcgtttaatagaccacttttttaaaatgaaatgaaaataatcatttaaggactttgactgtagtatgtcattatatttatttaatcagtaaagttcttttcctttcaggactctttcacagctttcccaacgattgcgagcgtataaaaagcgacgaagagcttcgtcagctgttcctggacgtgagaaacgtgccgggcatgaggacgcagacgaggatgtggaaacgcccacgtcaacgctgcgccgccacaagcgccataacagtctgcccaagaacgcactctatccgcgacacaccactgtacaggagagcctcgatgacgacgacgacgaggaggaggagagcgcgcaacagaaggatcagcagacgaagtcgaagatctgccactcggacactgagctagatcctccgcagaaggcgaagcagtgccacatagccgggcagaatcatcagtcggactacctgcagctgccctcggtttgcacttgtccgtattttggggacagaccgctccagaattgtgtgaaatcggcggaggtgaagattatttcgtccgccttccgagtgaccaccaccacgacggcggtgagcagttcgcccagcgagatggagctactcatgtgcagtagtggcaataaaaagtcattgacctccagtgtgagtgccggcataacaggtggaccggcaggagcggctccagccacagttggctccaccctcagtccacactctgctcacaatcagggcagctcgctgacagttcagagcgatggtagtgggtacttggctgctccgggaactccttgtcctggccgacgaaagttgagcatctcaaagaccgcctcggtggtcacgtgggattcaagtcgtcatcgtcggcggggcagcagttttggcggagtgcgaacatccctgctgttgacgcccaccaaaacagcgaccacctccaactcatccacaccgttgagaagatcggccaccttgaggagtcaccagaatatgaactaccagggagcgggcgaatgtggtggcaagaccaggacgacaacatcctcaccctgcatgttgcagcgtcagcagacggtgcgatctcatcactcgcggaactccagcgtgatctccagaaactcctcgcgccacggcaggatcatcaggctggagcagaaggccaccaaggtgctgggagtggtgttctttacgttcgtaatcctctggtcgccattcttcgtcctcaatctcctgcccacggtgtgcgcggagtgcgaggaacgaattagccactgggtcttcgacgtggtcacctggctgggctacgctagctccatggtgaaccccatcttctacaccatcttcaacaaggtgttccggcaggcgttcaagaaggtcctgctgtgccgctattcgagcacgagtgcctggcgaccgagcagataacagacgcccgttaaaccgggcaaactgaagacgaatacccacaagtgcgccagtgtggattttcaggattccactgctccggtgcggggcgttctgaaaagaagtgtggcagtggcaagtgacatataaatacggcaaaggccggtcatttcgcctgcggtccaccgcacaacgtgtcgtatacgcaatctcgaaaggacgataatgcccacccgcactccacaccacgcactccgcactgctcacacgtgtgtccttggggcttaaattcttatgtgcctctaattaatttcaaattcaatttgcatgccattgaaaacacatgtcccaggcgtaagaagtggggccaagtgaattagatattgaagtggagtcggatccccgcaggattgccaagggtcggggattaaactagccacagacaacagcataacgagcatgctactcacccctggtggttccttccatttccctcagctctcagcaaacggtgaagatgcacttaattgcggaatgtttgctttcgagcaacgtaataccggcaaacacatttactttatagcaacgctcttcagttatcgacaaagttctggctcaccgaaagttcatgtcaatctgttgatatttgatagcattttccgcgaaattccttttagattcactacgtactcgaaaataaacttgaaaattcacgtaaatttaaagattgtatatataaagttcaacttttgaaattcttaaaaataaagcgccaatgtcgcttcgcaaacttcgatcgataaacgctatttggtttggcatttggcaattatgcattaaatttatggcaaattcactgcccgccaatgcacaaagaatttcatcggtatccattaaagaaaccgacacgtacacaaatccacggcaatttgtgacttttgttgtttgtttgtgtggttggaccggcagattgctatttttatttgaaaagttcattcattttgttttatttctgtggcca

SEQ ID NO: 98 - DNA, 1251 bp, Drosophila
atgaagaatcggttttttttttcttttacaggctactttcctttgggctcggagcactgcctcacctggatctgcctggatgtactcttctgcacggccagcatcatgcacctgtgcaccatctccgtggacagatatttatcgctacgatacccaatgcgatttggccggaataaaacacgtcggcgggtcactctcaaaattgttttcgtttggcttctgagcatcgccatgagcttgcccttgagcttgatgtactccaagaatcacgcctcggtgctggtgaatggaacttgccagataccggatccggtgtacaagctggtcggctccattgtatgcttctacattccactgggcgtgatgctgctgacatattgcctgaccgtccgacttttggcccggcagcgccagaatctgggtggtggacagcagacggcggcggccactcccggatgggccagtggatggctcggccaggcaccggccttgggtggaccggcaggagcggctccagccacagttggctccaccctcagtccacactctgctcacaatcagggcagctcgctgacagttcagagcgatggtagtgggtacttggctgctccgggaactccttgtcctggccgacgaaagttgagcatctcaaagaccgcctcggtggtcacgtgggattcaagtcgtcatcgtcggcggggcagcagttttggcggagtgcgaacatccctgctgttgacgcccaccaaaacagcgaccacctccaactcatccacaccgttgagaagatcggccaccttgaggagtcaccagaatatgaactaccagggagcgggcgaatgtggtggcaagaccaggacgacaacatcctcaccctgcatgttgcagcgtcagcagacggtgcgatctcatcactcgcggaactccagcgtgatctccagaaactcctcgcgccacggcaggatcatcaggctggagcagaaggccaccaaggtgctgggagtggtgttctttacgttcgtaatcctctggtcgccattcttcgtcctcaatctcctgcccacggtgtgcgcggagtgcgaggaacgaattagccactgggtcttcgacgtggtcacctggctgggctacgctagctccatggtgaaccccatcttctacaccatcttcaacaaggtgttccggcaggcgttcaagaaggtcctgctgtgccgctattcgagcacgagtgcctggcgaccgagcagataa

SEQ ID NO: 99 - protein, 416 aa, Drosophila
MKNRFFFSFTGYFPLGSEHCLTWICLDVLFCTASIMHLCTISVDRYLSLRYPMRFGRNKTRRRVTLKIVFVWLLSIAMSLPLSLMYSKNHASVLVNGTCQIPDPVYKLVGSIVCFYIPLGVMLLTYCLTVRLLARQRQNLGGGQQTAAATPGWASGWLGQAPALGGPAGAAPATVGSTLSPHSAHNQGSSLTVQSDGSGYLAAPGTPCPGRRKLSISKTASVVTWDSSRHRRRGSSFGGVRTSLLLTPTKTATTSNSSTPLRRSATLRSHQNMNYQGAGECGGKTRTTTSSPCMLQRQQTVRSHHSRNSSVISRNSSRHGRIIRLEQKATKVLGVVFFTFVILWSPFFVLNLLPTVCAECEERISHWVFDVVTWLGYASSMVNPIFYTIFNKVFRQAFKKVLLCRYSSTSAWRPSR

SEQ ID NO: 100 - DNA, 8877 bp, Drosophila
gacctttaagcagactaaggggttgaggcaatccttttttcccaactcgtgtcaattaactcattaaacttcccaccgttttgtggagcgtcggacccaattagctttcaattataccgtctatgggctggtttttcataatcaagcaaaatttcaattaattaaaatgtaaccgagctaaaatggaggtgtgagaaagagcctttattacgaaggactctattacacattaaagttttatggaaagaatgaatattctcagtgagcaagaccagataagctgccaacatattttctctatcctgtcagcttcataaaatgttggttttgatgatggaaacttttgcccatgaaactttttgttcgcagattatcgtgaaagagttttgagctccgtttcgctgtattgttggcttgccaaactgttgcatacttttaggaagttgcaaggagcggaacatgtgtttgccatgtcaactttttgccatatttgtagccataacagctacacatctccgaggaaggtattttaggaattttttttgagtacatcaaagccgataaagaaaatcccccagacaatggaagcttaccgaaagaaaaccgcaatgataattccccagagaaaaacgccgatcgagtacactgaagtaaatagaccatttatttagatgctagaatttcttgtttatacagagaattaatccatttgcacattgagttacattcaacagctacagttggagttcatagcatggagttggttggattgttaatggggctctcagctgctcacatatacgacatttaacagtttaaaacgattgacctaacttatgttgcttgtttgctccgcttggtacttggtttcgtcctttcatcgcactccagcctttaataattagtactagctaactaatcgcactcgcagatctgcgacacggaagtggaaagttcaatgaaagttcagtctcttaagatgcacttgctagggatttgtctacaccgagttctcctcgagtccttgctggaattcgagaatgattattggatggtctgtatgagtgagaagagctgaattctggttctcaccctcatcaggggactaatggcccggggcattacgctcagagtgctgccggaactcatggcatttgccgccaaagtgggcatcgtgtgcagggcattgttggagccccggtggagtgaaagtggggcatgctgacccaccagcgtggtggtggtggccgaacttacgcacgattcccgcttgccacgcccatagtagctggtcaaaggtctgcaacggagtggatgtcaagatatcccgtcacttcttagccacgattgccacataacttaccgcatactctcggctcggggggaaccaccgcctttcgagaagcttttcgtggtataactgccaagtttacgaagaaatgcgcagaaaaagttagtgtacaatagtgaaaatatttttaatagctgccattcctagtagcaatctagcattgccacactttatgataggtttaacattaaaggcatttgaggagaaatatgtacaacttagttgtttcctatataagtttgcagttttctcttctcgagtagtgtatttattcttaagtgtacttacaagcagacttaaaagtttggactacttaccgtcggttctggttaagctgaatggtgcgcgtgtcccgccacgtggaaatgtggtgtctcagtgcatttcgcacctccgagttgaggaaacagtagaacagcgacaccgagaatccctgtggcacacacacaaacagatctttagaaaaaaagtggctaagaggattgacaaacgaaacccacctgagtgctgagtaataccgctcgcaggacggcaaacatgtgtcccattaggccagattccgagggaccagccagcaccaccaggtaggtgatgccaaaaagtgggattagcaccagcagtgccttagcagctttcctatactgacgagtctccactgtattggccgagcgcagctttgtgattagaacctaaaagagaagcaacccgataatctggctcagtattttcggcaatttacagtcggaaaaatgtcggatgataaattgtaaattcatacaatagctttaaagtgtttcaagaaactaattgggtgattcataaatgtgagtttttgcatccatgttaacttgttcaatcttctctgatgttctttttttcgcatatcaatattttttctgtgtaaattccatacgcacccacatgatacgcagcagaaatgtgagattgattattagcaccgcacagacaggtccctggtatatccaatccacatgggtctcctgcatccaggggcagttgatttcgtactgtcggatgggaaacaaaaggaagactactctccaggggtctcttcaaatcccaaaatagacataccttttcgggggtgctgtaggtgaccgtcagactcttggccacagcccaggtgacaacaaacaaggccgggccacctgccagcaggagaaagacttaattggctggcacacacaatcgggcattcacacttaccccagcctatggaggcgtagatattaaagcgtaaattgtccccggagaaagtcttaaccaccagcatgtacaggtacaaaccctcgaccagcatccaaaagaagttggtcagggtgaagaagtggaacagggtgatcagagcaatgcagctgcccactccacttcggatggagatctgtagattaagtggtagccattagtcttaagctgtcagcgtctgtttatagtttcctttcactttggactagcacccctttcaggcacgagtatgatttaataagccagcaattgcaattatctggcagtctcataatgctcacctggacggataacaagagtatccagaacaaagccgacatgatgtacgtgaagaacaagttggcgtggatggtgttgcgcaggcaacgcagctccctggtgaacaaagacaaatacaaaggacggggggtaagtcgggggttaggcaaaaataaatgccatacccagggtatcggggtcaccagggagggggctggggtgggtacactcacttgaagtaggcgaaaacaatcagcgccagcgagagcgataccaggctgagggtgtatccaatgtagtagataatggtgggcagctccacgatgacctcgaactccggcacggattctggggcgggcaggtgggcgcaggcatcgtagttggtgtacttctcccaagttccattggcgtggcagaacctcgttgcattctctggtcaaatacaaaaacgcacgcagcgaaaaatgcaaacagtttttaaatagactagtcctatacacttggatctatattgggaatatgccttctctgtttggacatcgacttaaaaaattccaatttaaattcataacttagtgcaaagctaacagtttttttcaaacgcttagtttaaatataagtctaatgttaaagtataaggtcaaaggggtactcactgctgctatcgtaatgaattccctgcaactcgtccatgcactggagcaccgccagggtaccgcgagctgtcctcggccagcacaggatcgagtcgaactgggtgaggcagtggccactatcgttgccataggtggatgcctcgatgtgctcctgcaccaggcactgcaactccacgctctcaccgatgccatctaggttgtgcagatccaggagcggatcactcccgctggcgttcaccgaatcgatgtggttgtggtcactcattctacaacatcctggcacttggcatctctggtactgaaataagtcagtttaaagttgaggcaaagattgtaaaatacttgaagcagtgggaaaatttaaaatattttagaatcattatagagttttaatacatttcatttaagaaccgtcggacaataacgttttagaaaaatggtaagctttaatcggaaataaaatattatagactgatacgaaaatattgctgtcatttcctgaccatttccctacgaattgacaacgttcataatactccccagctgaattcgttcaatcagaaagttataatttcctcaattgttaggggattccccggcggttggctgaaactaagctgtcgggcaaagttcaattgccaacccttctgctcgctccaccgcagccagtggcatttcgcctgtgtgcgttaattgcattggccatgtttcaccgacaacgggccacgcccacatcgaactcggcttaaagatccatcaactcggcgggaagtatgctttaagccaaagaccatttctagggaaaacagggtggctagagataagtaaatgcacaggcccagtgccataaaaattcattagttttgccatcaaaggcggacagaagcgtcagcaaatcagagaagcggcaggcaaccttttattctgatatgtgcccataaaaagcacgtcaaaggacccaagtctggggtgatggtgatagaaattagaaaagctaacttccggccaaagattgtggcctttgtggcctggttctgcctggttctgcctcagagacgaaatctcgcatttatgttctgataataaatggcataaatgatgcatcgttacattaatgcacgacataaaacggggcggcaagtaagacacacacacaaacaatacatattaaaaatgtagatgggcctgtttgtacagtgagctagaaaagtaaaagtgcgctctttaaaatttaagcggaagtggctttcactttctacttaacagtgaaataaattaggcaaacaagccagcttgaattccaaggagaagccataagccaaggcaggaatttaaatccactcggagtgaaaatggttatctcttaagtgatgcccaacccgaaccaattactttctgtggaatttccgattttctcggacggcacattccccaggcgattttctaattggcacaggaatttctaaccacaagccatgaaatattaaacccgaagggaaattgaaaattctgccccaaggcttgggtgctccacttctggctgccactgtatgctcggcttcgtatttttctttccattgtttctgctgtttgtttttctcgtaaattaacgcaatgcatgtacataaaacaaaggctggctgattattactgcacggcacatgcctgcacgtcctttccggagtttgccaaggtcctgggtcctggttcattagccgctcgcttacttataacacatacgccccgttgccttcattttccagcttcgcacgctcacagcaacgcagatgagttaagacagcaatatacgcgccgcaattttaagttgaaaagcatattatttgcaaaaaagggaaagaacggcgaaggaccgcctctaattacctcataaataacgtcgcacgaaattagctggcctaaattatggccataactgctaattgcatatttgatttcaattagttcagctgacaggggcccaaaaacccaagaaggacacatttgaaatcagcgtgcgaatgcaaatacgttctgacagctcgcttggacaaatctcatttatggccagccaatttgacgaatgtccgcccgccggggaaacaggcaaaacaaattcagcttggccgaatcatcgccggcataaaaaggacattaccagaaatacatacatatacggaggcataagaaatggttggtcctggacgaagaccaacggacaaatcgcacatcgtcctttctgctcctctgcctctttgcagcatgctattatagaagattgtatgtaatctcgtacgattgcacacaatggatttgccaaaggcgacacaaaaaaaaaaaaaaaaaaaaaaataggggattgcgtggggggagtttgcttgtgggtcctttactttttttctcccccatgtgagaggttctgcaatttcctgctgctataatgcttataaatgttcacccgcaatcgccggggatttctttagggaattgaaaacataataacagtgcgaatagtggcaagcattcgcattttccacttatccaactaaatatgcagactaaaaattaaattccagttttttcaagccctcgaaggggatttttattttacgcccttatatgtgtacctatgcaaaaattccgcaattccgcgggacaccggggaaaagtgctattttcggttctcattaatgtagctcattaaattttatatgcataagctgccagctgcaaacaaaaaatgtaagcatttaaaatttataagcgtgccacacaagagaccaacagcacattacgtatacgcagcatggacaaagccagcttggaaagccagcacgcaggcataagcgtatagaaagtttgtaattaaattgctcatttaagcgtggaaacaatgaattcgatcgggaatacagggagtggggagtgttctgaggaaatatgtaatattcagcgtgtaatccgaagaaaatatattactaattttattcatccgccttgggcgcttaaattttattgttcggacttttgtggactctcctcggaggccgataaggaaaagccagtctagacaagccaacatcataatttgcaggcacgcactgccatttccatttccgcccaagcttgagcctgatctgctggccactttccatgcttaagtcagcacatatcctttagcaggaagatggaatgggatgggatggggctgacacttcagcgattgccaacaagtgttgcgttttattgtctggcctttaacagctctcctttgccatccgcccattgtgtgtgcggcacgtgcaggcgcctgcatttggagctacgtgagggatctccactcctgtggatagtccgagcataaaaccataaaaatccgccgcaaaaaaagaaacgaacctggccaccaaatctgttatttattggcccaataaaaatttggtttaatgcattacaagttgccgaaatgccacggagattgccggagatttacttggcttgcaaagggaagtccttaaggccatggcaacaagtccttcctggttagcagttagtttattagagtggtcaagtgcatggagtggggggcatttcggatttcgggctgaaattttcccaatcgatactgcaaacacgcaaaacaatgcctctgctgccaactaatatccatactctcggctcattcagccacagagttttcgttttagtaaccgctggcattgttttcagcaggtgagcgtgtgtatgcactggcattttaattaaccacaatttgtttctgcattccaaacgccctgaaaacgcttaccttctactcctagccaagtttctatctgcagaatgagattcctttcgccactcacactcacaatttgcgttggaattcttgggattacttgcgtttagcactcggactacggaccgcaaaagcgccaggaggcgggtcctttgtcctttcgaccacctacttgacccgtcctaaatgcgtttaacgccttccaagctgcgaaatgattatgttaaagcggtttttgctggagcggttatttttgctagttgccttggttattgacacacgcccatttacgtgggcaaaactttattgagttcacatttatatgcgggattatttgttatagcgacccttgaacttattcgaagcactcaaagccaacgactagaaaagttattcgacattaatgcgcggcacttatttgttatttcttttgcgtttgctaattaaaattttcatttttctcttcgcacattatttaaaaattagtttccactttaacggctctgaggaggacaataggttttcgcaagttttgaaattccgaaacgaaccgcactcgtacacatcccgctgataactgcggggatacccgaaggatgtgtcttaacaaggctcgccttcttaccaaaaggcgccaattctgggttccacaaagtgaaaagctcgcaaagctgcattccacaagctgttgaaaaagctttccgccgggcaacaggtggaacatcctgacgggaggttgggtaaaaggaccccaaacagaaaccgattcgattgcacttctaatgcctgaaaatctgcctatttgatttatgcaaatatgtgccggagtctcatgtttgcccagcaattcgctggctgtttgtttagggcatgcggcaaaagggataccccggactcaacaggattcggcaggattcgccaggatattgtttgtgaaactccttgcaggccgtctttgaagtcgcaacctgatttaattgtgattttcggagcccgttcaaaacacctctcacgtgggcctaatcaaattaaactgaagtggcagcgcctcgggtctgacagttattgaaatatcaatatggctaggctccgggaaaatggtttcccggaaaatgtgcgaaattaaattgtagagaaaacaagggcaacatttttactcactggcatcttttctcatgcctgccaaattttatatcacaatgataaacatttagacggatgtcctggctgcttggaatgcgtgcgacacatgagggttgcctgtgtggatttttgggcgcaaggatatgggcggggtggtgggggcgatatctccaaccaaactgtttgatttttaaacaaatgctaatgtcaactgccactcagaggcatttaaattccaatttaaaaatgctttctctcgatgccaaaagcaaagacatgttcgttgtcctgtttcgagtccatccactcgttctttttctctcagattctccgattctctgacccgtttctccagttttctgctcgcattaaagcgttcgtcctgtctcatgcatatttaatgtcacacg

SEQ ID NO: 101 - DNA, 2089 bp, Drosophila
cggttcgtttcggaatttcaaaacttgcgaaaacctattgtcctcctcagagccgttaaagtggaaactaatttttaaataatgtgcgaagagaaaaatgaaaattttaattagcaaacgcaaaagaaataacaaataagtgccgcgcattaatgtcgaataacttttctagtcgttggctttgagtgcttcgaataagttcaagggtcgctataacaaataatcccgcatataaatgtgaactcaataaagttttgcccacgtaaatgggcgtgtgtcaataaccaaggcaactagcaaaaataaccgctccagcaaaaaccgctttaacataatcatttcgcagcttggaaggcgttaaacgcatttaggacgggtcaagtaggtggtcgaaaggacaaaggacccgcctcctggcgcttttgcggtccgtagtccgagtgctaaacgcaagtaatcccaagaattccaacgcaaattgtgagtgtgagtggcgaaaggaatctcattctgcagatagaaacttggctaggagtagaagtaccagagatgccaagtgccaggatgttgtagaatgagtgaccacaaccacatcgattcggtgaacgccagcgggagtgatccgctcctggatctgcacaacctagatggcatcggtgagagcgtggagttgcagtgcctggtgcaggagcacatcgaggcatccacctatggcaacgatagtggccactgcctcacccagttcgactcgatcctgtgctggccgaggacagctcgcggtaccctggcggtgctccagtgcatggacgagttgcagggaattcattacgatagcagcaagaatgcaacgaggttctgccacgccaatggaacttgggagaagtacaccaactacgatgcctgcgcccacctgcccgccccagaatccgtgccggagttcgaggtcatcgtggagctgcccaccattatctactacattggatacaccctcagcctggtatcgctctcgctggcgctgattgttttcgcctacttcaaggagctgcgttgcctgcgcaacaccatccacgccaacttgttcttcacgtacatcatgtcggctttgttctggatactcttgttatccgtccagatctccatccgaagtggagtgggcagctgcattgctctgatcaccctgttccacttcttcaccctgaccaacttcttttggatgctggtcgagggtttgtacctgtacatgctggtggttaagactttctccggggacaatttacgctttaatatctacgcctccataggctggggtggcccggccttgtttgttgtcacctgggctgtggccaagagtctgacggtcacctacagcacccccgaaaagtacgaaatcaactgcccctggatgcaggagacccatgtggattggatataccagggacctgtctgtgcggtgctaataatcaatctcacatttctgctgcgtatcatgtgggttctaatcacaaagctgcgctcggccaatacagtggagactcgtcagtataggaaagctgctaaggcactgctggtgctaatcccactttttggcatcacctacctggtggtgctggctggtccctcggaatctggcctaatgggacacatgtttgccgtcctgcgagcggtattactcagcactcagggattctcggtgtcgctgttctactgtttcctcaactcggaggtgcgaaatgcactgagacaccacatttccacgtggcgggacacgcgcaccattcagcttaaccagaaccgacgttataccacgaaaagcttctcgaaaggcggtggttccccccgagccgagagtatgcgacctttgaccagctactatgggcgtggcaagcgggaatcgtgcgtaagttcggccaccaccaccacgctggtgggtcagcatgccccactttcactccaccggggctccaacaatgccctgcacacgatgcccactttggcggcaaatgccatgagttccggcagcactctgagcgtaatgccccgggccattagtcccctgatgaggcaaggactcgaggagaactcggtgtag

SEQ ID NO: 102 - protein, 504 aa, Drosophila
MSDHNHIDSVNASGSDPLLDLHNLDGIGESVELQCLVQEHIEASTYGNDSGHCLTQFDSILCWPRTARGTLAVLQCMDELQGIHYDSSKNATRFCHANGTWEKYTNYDACAHLPAPESVPEFEVIVELPTIIYYIGYTLSLVSLSLALIVFAYFKELRCLRNTIHANLFFTYIMSALFWILLLSVQISIRSGVGSCIALITLFHFFTLTNFFWMLVEGLYLYMLVVKTFSGDNLRFNIYASIGWGGPALFVVTWAVAKSLTVTYSTPEKYEINCPWMQETHVDWIYQGPVCAVLIINLTFLLRIMWVLITKLRSANTVETRQYRKAAKALLVLIPLFGITYLVVLAGPSESGLMGHMFAVLRAVLLSTQGFSVSLFYCFLNSEVRNALRHHISTWRDTRTIQLNQNRRYTTKSFSKGGGSPRAESMRPLTSYYGRGKRESCVSSATTTTLVGQHAPLSLHRGSNNALHTMPTLAANAMSSGSTLSVMPRAISPLMRQGLEENSV

SEQ ID NO: 103 - DNA, 3731 bp, Drosophila
catcgattaaccactatcccatttattgcctgcccgtctacacaaatcggcacgtgaacgaggactggtatcgactttataggacctacgacaccgagggatttgttttcgggcagttttacgagcgtctccagcggtacgagttggactgaattaatgccctttttcagaaagaataagatttagacaaaatctgtgatatcgatactgtggtagcgttgcagagatcccaatcgcgtgtgtggcgaaggacgcagacagataacacattcctccgtgctgaaaatcaattataattagtcgtgggaaacaactaaaagaatataaaaatggcccgttggtttataaaaaatataatactttaatctgatctcttataatgtaaactatcatgcaatacttagggacgaacggatgtggtctacatgtatgtcgtatacgtatatttttgtgtggtgttcattcatagtgtccagtgggtataggacttgttgatgtcagtctacaataaacgataaacagaaaaaggaaaaccccaatcagaaacataagaaaataagtaagaataaaaaggatatctaaagccaaccaaccatgcagaataaacataacattaagaactgatgtagggaaatgcacggttttaagtagatcactttagttggcacgagtgtgttagtatatttagagaacgggtgcaatttaactttggaattatttggatgggtggatgtcaaagaagtagaaagcatatacatgagcattgcgtatacgcaccgtagactttcggttcgcgatctcagcgagtagtcttttgaggcgcgatgcctgaaatggaaattaattggttaaatgacaacaacaacaacaacaacatcgacgacaatagcgaacaactacaatatcagccatagccacatcaactaggtagtgcaaatagtgaaaagccaatatgtcgacagccagggttatataaatataatccaacaacaataatgtgctagaatgccaaatgagtgcagtcgcccctcaatgattggttagcccacctgcgattcttgatggaactgttccgatggatattcctgctctcccgccaccgggtgaatccatgcctcagcgtctggcgcacctctgagttaaggaaacagtagaacagagccacaaagaagccctaaagaatggattttcgaagatcaatgtttatggaaagactgtcacctaatctatatacctgcgtgcttatgagaaaggctcttatggcctcgaagagattacgactgataccctgttccgggcctgttagcaccaacagataggtgatgccaaagagaggtatcagcaccagcagcgccttcgaggccttgtaatactgccgcgtttccagggtatgagcagaacgtaatttagtgatgagtacctgtacgatatgatataatagcatgaagctaactcacttaagccagaagttaaccgggggactcacccacatgatgcgtatgaggaatactagattaaccagcaaagccagtgatgcaggtaccttgaatatccagtcaatgtgagattcacgcatccatgcacaatcaatttccagcttttgaaaaatcagaagaggttagcaagcatatctaggtaggtggcaattggtatcataccccattgaagtgctcgttctcgagatgcggagcaaatgccttggcaatggaccacaccaaaatgcatacggctggacagccccagccgatgagggcgtagataataaagctaatgttatcactggagaatgtttgcaccaccagcgtgtacagatagaggcctataaaaagcaaatgataaaaccgaggaaattcaattgataccgcctttgaacccaccctccacaaacatccagaaaaagttggttaggtaaaagtactgaaacatgattaccaacgttatgcagccagcctgactagactctgtggttatctaagtgaataattaattagtggagtgggatatatatattccagcttatcttaccacttgcaggaacagtgtgagtatccagaggagtgcggatgtgatgtaggtgaggaacaaattggcatgaatggtgtttcgcaggcaacgaagatctctgaagagttttaagcatgaaaatgatgcaactcatgtgtggcattacaactcacttaaagctgaggaatatgatgagagccaccaccaaggtggcgaagctcaggaaataaccgccggcatatatgatggccggcagttcgacgttgggtgagaagtcgggcaccaccggtatggagcccgagttctggtgacagcggtcatagtccgaatagtgatcccacgttccgtttggaaagcaaaagcgggtggcattgtctgcaaatatattgattttatttaagatctaaacccaatctggaatacccacctgtggtgtcgtagtgcacgcccttgaattcctcgaaacagggtagtacagccagactgccggcgtttgtgcgtggccagcacaggaccgaatcgaacgagctgggacattgtaaaatctgtaagaaataacaattgagaatatacaatgattggcaaggtaaacttcgttgagcatttactgcagtataattcgtgtttcccctctgtaaacgcaactgacctagcccaaaacccattaaatcagagtacataagattcatgccccgtttctgactcggtataataatgatgccttcattgcggatcctggtcatttatagctctgacgcatgattttctttaatcaaatttagtttccagactttacacacacacatacgcagcgtgagccaaatatcgatgtagtcccaaaaaaaaaataaagaaagaatcaccagctaccgctttatttatatatttgcaatggcgtgctaaacaatttcgtgcatacggatacacaagttatatgtacatatatgtatattaacgttaagtatacgacgacccggcgattgtttacccagttcagttcgtagcgccaaattaatcgcgacgcgctatggtagcggtgttagaaacagagcttcattgatattttttttattgaccttatcaggtgacgccgagagcgcggagcggagactcgtcgaagaattcaccaaattggcaattcttttatggccggtcttcccattactgataagcccgagaacctttttgcgacagctaatgcgatcggacttagccacgcgacaagtgagctgtcaacgagtaagccaaacactggagactggaaactccggcaatatttgtttctttgctcttctgattttcactcattagcctcgtcatttggacacagtcatagtacgaatacattttatgacattttcgaggaacaacgcccttgatcgtgcattcggtataaacaaaaatggctaaatgcagcctcaagtggatttccttgggtctagttttgtttacaggcgagaggaatacataaataaatatgtgctgcattttccggaaataaaatgccaaaataatttaatccgaaagcgatcgacagtttacttgcctggtttttcatcgtatcgtacttaaagtgaaagagattgacgggcggatggattgaagccaattatttcggaacagaagatggatcaattagcgggtgcgattaattgggaaattcctcaatcggcaaaagagatgaattcattggccaaacaaagggtaattagggaatatttattggc

SEQ ID NO: 104 - DNA, 1167 bp, Drosophila
atgaaggcatcattattataccgaattttacaatgtcccagctcgttcgattcggtcctgtgctggccacgcacaaacgccggcagtctggctgtactaccctgtttcgaggaattcaagggcgtgcactacgacaccacagacaatgccacccgcttttgctttccaaacggaacgtgggatcactattcggactatgaccgctgtcaccagaactcgggctccataccggtggtgcccgacttctcacccaacgtcgaactgccggccatcatatatgccggcggttatttcctgagcttcgccaccttggtggtggctctcatcatattcctcagctttaaagatcttcgttgcctgcgaaacaccattcatgccaatttgttcctcacctacatcacatccgcactcctctggatactcacactgttcctgcaagtgataaccacagagtctagtcaggctggctgcataacgttggtaatcatgtttcagtacttttacctaaccaactttttctggatgtttgtggagggcctctatctgtacacgctggtggtgcaaacattctccagtgataacattagctttattatctacgccctcatcggctggggctgtccagccgtatgcattttggtgtggtccattgccaaggcatttgctccgcatctcgagaacgagcacttcaatgggctggaaattgattgtgcatggatgcgtgaatctcacattgactggatattcaaggtacctgcatcactggctttgctggttaatctagtattcctcatacgcatcatgtgggtactcatcactaaattacgttctgctcataccctggaaacgcggcagtattacaaggcctcgaaggcgctgctggtgctgatacctctctttggcatcacctatctgttggtgctaacaggcccggaacagggtatcagtcgtaatctcttcgaggccataagagcctttctcataagcacgcagggcttctttgtggctctgttctactgtttccttaactcagaggtgcgccagacgctgaggcatggattcacccggtggcgggagagcaggaatatccatcggaacagttccatcaagaatcgcaggtgggctaaccaatcattgaggggcgactgcactcatttggcattctag

SEQ ID NO: 105 - protein, 388 aa, Drosophila
MKASLLYRILQCPSSFDSVLCWPRTNAGSLAVLPCFEEFKGVHYDTTDNATRFCFPNGTWDHYSDYDRCHQNSGSIPVVPDFSPNVELPAIIYAGGYFLSFATLVVALIIFLSFKDLRCLRNTIHANLFLTYITSALLWILTLFLQVITTESSQAGCITLVIMFQYFYLTNFFWMFVEGLYLYTLVVQTFSSDNISFIIYALIGWGCPAVCILVWSIAKAFAPHLENEHFNGLEIDCAWMRESHIDWIFKVPASLALLVNLVFLIRIMWVLITKLRSAHTLETRQYYKASKALLVLIPLFGITYLLVLTGPEQGISRNLFEAIRAFLISTQGFFVALFYCFLNSEVRQTLRHGFTRWRESRNIHRNSSIKNRRWANQSLRGDCTHLAF

SEQ ID NO: 106 - DNA, 7564 bp, Drosophila
tttccgctgccatctgcagctgtagctgcctaacaaatgcaattaaaatctttgcgcaagaaaattgttgcagcaggcacgcagagatactcgtactgtatgtgctgcaatagtttggtggcagcaacggggcggcagataacatattgcccacgtccggctgaaattgtacggacaaggcgaactcaaaaaaaaaaaaaaaaaaaaggaatccctcaaaaggagaaccaagaaaaatgggatttatctctggccaagctccagccatacaaatctaatttagaccacacgacggcttcagatattttatattccccactcagttgcggtccatcctgatctcctccagcttgcttgatgagcccagccgttggccaaatgaaattatttatgggcagtcctaggtcagtgagaatttggttttttaagggtttgaactttgcggctcaacaatgcctgtgattttttttttttttattatttttttgcattgcatccattagagaaagcactcctttggcattctactcagctacttgccacataaatatctacggagggtagctaactagtccttatctcaacttccccatttatcctcgccgcaagtgcacttttcctgctgctaattaagttgcaaggcagctttctcagcaggcgttgcacgaagtagataaaaggaaaagcccccgatttgcagacactatgctgggaaagatatatatatatatatattttgccagcattcgctaatcggcttagggcagccaccatgcgaccacaacaacaacaacaacagcagcagcagtgtgctccatgcaatatttaatcacattagttgatggggtaacggccatgtacgcaacaatttacaacttgcattaattatacgtctagttggacaatggcgcctctaactatcccactctaaatgtatctctatctctatccttatttgcaggggacacccgttgataataaattattaatgcatctgctgggaaggcggcactgcacggctgtccttggcagcaaatccagttgcaacatcggtgagtgacgggcggcaatcacaaaggacttgcaacagttgccgttgcttctgctattgctgttgctgttgctgttgcaacaatggccagtggcaacaatgaaactgagccgctctactgcggcagcggcatggataattttcatacaaggtaagcgactttcaccaatgtcacgatcaaggccaaggggcttttccaccagacatggcgacaacaataccataagccaacagttgggggcgtggtcgggggcggaggcgatggtggcaacatcatagccattagctgctggcgcaagggaaccgttcaaaaatcgattatcgccccatttcgggggagcttctattttgatttgccgtacaattttctcgggcgattaaacgacgaagcagaacgaaaacaaaaaacagatttgtcaacagcaaggtcaacaattgatggctgaaatcaatttaattgaccatatcctacgggccctccaagtggccatctgctgcacctataaaaaagtgaatccggtctgcgattatttatatattcgttgcatggcaggcggtcgtaaaacctcgagatgatgattaaaagcggccctaaaaacttaatggcggtttaggaaattcaattcctgtaatttaagccgagtcaccattcttcgaagttcttacatgtaagcgataataaatagttaagtcaattggccaataaacctattaatattgtgcatttaccacgattagactttgattaaagtgacaatgctgatttctgtagaggaaatctagttctagtcttcccacaaagctatttagttactcttgaataaatatgttacttttcttttgccaaaaccaacagaattttaaatttaataatttggattttttgcaataaactgtactgattaatgggccacacaaaaatgtctagtttattatggagctcttggtttcataaattaagaacataatccaatcggcatataaatcattgatagcaatttattttccgtgatgaaactgtgctccgtgtgaactgcgaattactcattctacggttgcaaaaaaagccaccaacggtcaacatttagaccaggacttttagttttaattagagccagcctggccaacagcagtgttaatgaccacaaagtggctggccacaggatcagcatcccagaatgcgatgccgcatttgctttaattaaaggtagtagctggagtttgaaagatgactgtatggcaattagatgtgtagccagaacacttggccatttacttttgtgtcaaagtcgtgccaaattgccagcggaggcgacacttgacgctgtcacgccccagacagacgcagaccggcccaaaagcacccactcagccgtctccaggcgccactcaagcggcaaaggaacgccaaaacactaggacacagaacgccagaagactcgaaaaaaaagtataaaattcaaacgcgtatacaattcaatgtgtcacatcgaagaagaaccctttctctggcggcaacgtgacgtatacgcaatattaatggcaaagcgaaaagggcctcaaaagctaacgaaaaaccgcagcataacacgcacaaaacaagcaattaacataaataataaagaacgcacaaaggcgttcggctctccgttgccaaagagaaaagccaacgaaaggaataaaaaacgccaaaaagcccgaaaaaaaaaccgaagacccaaaaaatgtgtaaaattgatttcggaaaatatttaatttaccaaatgcatgctcgctttttgcggccgtgtacgccccgaacaaataaaacaaataggcacacatcgtctggcatttcatgttaaaggcttctcatgctgatggacaggatacagaaaatatatatacgaagtgaggtgtgtgtctacgtgccacaaaaacagcgaaattgaaacgctttccgaatgccggcgacactttttggcggcacaaccctcgtcttgtcgaccaactcctggggaatttacaactccattcatcaaactcacaaaaactttgcctggtgtacggtcttgggttcgtcgtcgcaggatttcacctggctaaaaatccagactcccagccatccctgagtctaatttatggcctttgataatccatgttgatgaatggcggcaacgacaacaacgtcgacgacatgaatgaagtcctggaattgttttgcaccaggatggcatcggggctccaggtgggacgtactggctcaaagttattggcccagaaatcaggcatagttagctgccgaaatgaaacccaaataccgagaaaactaggcaaaacaaacagtagtacaccggaaatgcatatcattgtaaaaactacatcagtttacctaaaaggcttggcttttaagctttcacatttataaaatattgaaaatgcatataaaagtatgaaattaattcccttttgtcaataaactttctttctttctttctgtgtaatatgggggataccggttttttttttttttcaatgaaatcccttcgaaaggtataagttcagaatcgagagttttatgccaagttgggcacagttttttttttccccagctacctaaaataatagagacattttcctcccactacaactgattgcattgccggtgcagaaagttttttcagttggttcggaaaaatttggttcgcaaacaaattaatatgaactggcaagcatttttcgggcaaaaagctctcatctatgtagattggaatggaaattccggctagaattgcataagaccacctgcagtgtgggctaacatgactaaaaagttgtccacaaatttggcttagattctccaataaaactgtcgttcggccaggaatccccttttttgtttcgagtgaatggggaatttcgcacgacagacagcaataaagaatttaactaaagtcctgacaccgacagcaccagcaggacgcacacgtgtcactccatttggagagcttggagtatattaaacattttttccccaccagtcagccgcaggacttgcatcggtctcgcctcgcattttcctatataaattttatgctaagtctaatttgttggctgcaacttgcacaaaggcaaaaaataaacaagggcgaaatgccgaaagccaaaacccaaccgaaaccgttgagggctgcctcgcttttttcctgtgccgaattccctaaaactttgcacataaatttgagtcctgcgcctgggcttttcctcttccacctttttttttagcctcaaagcgctcgacgaaaactaaacaaaagctggtaaaatgtttatcccagaagggggcggtgtgggcgtggcttgcttaagccctagacacccgagagtttattgcctcagtgttgcaaacgctgctgcttggcaagtcaacggaaatggctttcggatggttttattgcctacttttgctgcgagaaagcggactagacatggaagtaacaaattggttaaggctaactagagcataataacagaaacatcagaaacataatttgggaaatgcctgccactcaccgacaacatttcgatttgtgtctttattacacttctctgccgtgatgggttataacttttggatccttgcagagagttgggaaattgcttaaaaataaaatttgtttaatttaatttgaggtggtttttcaaacaattttaatggattaataagtttaggaagttaagtatatacatctatctattataccatcttcaaatattgttgaattgaagagataactcggagctaatcccatatttttcatttttttcagctacaagaacatgcatggctatgtttcgctggtggtctgcatcctgggcaccatcgcgaataccttgaatatcattgtgctaacccgacgggagatgcgctcccccacgaatgccatactcacgggtctggccgtggccgacctggcagttatgctggagtatataccctacaccatacacgactacatcctgacggacagtttgccgcgggaggagaagctcagctacagctgggcctgcttcatcaagttccattcgattttcgcccaggttctgcacaccatttccatttggctgacggtgaccctggctgtttggcgttatatagcggtgggttatccgcaaaagaatcgcgtatggtgcggtatgagaaccaccataataacgataaccaccgcttatgtggtgtgtgttctggtggtgtcgccgtcgctctatttgatcacggctataaccgaatatgtcgatcagttggatatgaatggcaaagtgataaactccattcccatgacccagtacgtaatcgattatcgtaatgagttactgagtgccaggacggctgccctgaatgccacgcccaccagtgcaccactgaacgaaactgtgtggttaaatgcgagcaccttgctgacatcgacaaccaccgctgcaccacccacgccatcgccagtggtgcgaaatgttactgtctataggctataccacagcgatttggcgttgcacaatgcctcgctgcaaaatgccacatttctcatatacagtgtagtgattaagctgataccatgcatagcactcaccattctgtcggttcgattgatcctggccttactggaggccaagcggcggcggaagaagctcaccagcaagcccgccactccgggtgccagtaatggaaccaaatcaccggccaatggtaaagcagcggataggccccggaaaaatagcaaaactctggaaaaggaaaagcagacggatcgcaccacgagaatgctgctggcggtgctactcctctttctcatcactgaatttccacaagggattatgggtctgctgaatgctgtgctcggagatgtcttctatctgcagtgctacctaagactgagtaagtaaatatgtactatgcataacgccacagtaaattccacagattcccatttcactttaagatgtaataacccaatgccttttgccttttgccaccaggtgacctgatggatatcttggccctgatcaactccagcatcaacttcattttgtactgctccatgagcaagcaattccgcaccacgttcacgctgctctttcgtccaaaattcctggacaagtggctgccggtggcgcaggacgaaatggcagctgctcgagctgaacgctctgcggtggcaccggtcctggaaaagggacgacagcagccgcaggtggtgatggccagcacgaccaccaacatcacgcaggtgacaaatctgtagcacaggaggagtcgtggtcgccgaactttgctcagtcgcctgctgagtgtcctgaaacgcggcagaaggcgctcctccggcgaaggaggaggcgtgggaggaggtggtgcgccgttggccggcaacgatgcggtggaaccagcgttccaggccatcgtggtggtggtggacaaggtgagcggtgccacggagaatcagctgtacaccgccgagcaagctcgtattgtgacgtagtaaccctgatagtagtacatattatatgcctagttatccttgtaaaaagtaaactagttgtgtaagaatcgcagataaccacaagttatgtgcatactttggtgggaaatcgtaaaacccgtacagtcataataataaaatgctggttcatcactcatacgcaccgtttgacttcactctattccacattcacagtcaagtaggagctgtaaaaatgctgtgcataaacgagctcgtatacgctacagctggcgtcacaataatagttaccattgggttggcttcacaacatagatcaaagtcaaaaaatatatagttttgtaaaatgtttcataaatctatcttcatatttaactaacacaattcagaaactttcgcttgcatggaaaatgttttattttccccacttgacccaattgtgcgcaactgttcagcttttcggcatgaatcaaatcaaatatagtaaacttttgcatcttttccactttgatcccatgcgttttcatgttgatttcattcgcataaagtatgcagcacacgtactcactcaaaactacgaattttcggcaacgatttgagcagaatatttgccatttgttgtacagattatatatacacacacacacacttatgtccgtatctttaataatggcaattaagtcctagaaattttgacctgatattgatgcaggcattggaaaaataagtggcagttgcagtgcggtgcgttgataaatgaaatactttgcgaattctattattggaaatcgcaatttgggctgtgaatgaaattatagttttcttgaacgcaattgagaattcagttccgtttcgtgggttactgaatttatgggaaataatttaaggcagtcactgcagctgaccgaataatccaatgaaacattgcataaacagtttgcagtttttccacacttgcgaaaattgtaattgcaaatcgcttaagccccacgacgaatgacaaatggccagcgaacgcata

SEQ ID NO: 107 - DNA, 1757 bp, Drosophila
ggaaggcggcactgcacggctgtccttggcagcaaatccagttgcaacatcggtgagtgacgggcggcaatcacaaaggacttgcaacagttgccgttgcttctgctattgctgttgctgttgctgttgcaacaatggccagtggcaacaatgaaactgagccgctctactgcggcagcggcatggataattttcatacaagctacaagaacatgcatggctatgtttcgctggtggtctgcatcctgggcaccatcgcgaataccttgaatatcattgtgctaacccgacgggagatgcgctcccccacgaatgccatactcacgggtctggccgtggccgacctggcagttatgctggagtatataccctacaccatacacgactacatcctgacggacagtttgccgcgggaggagaagctcagctacagctgggcctgcttcatcaagttccattcgattttcgcccaggttctgcacaccatttccatttggctgacggtgaccctggctgtttggcgttatatagcggtgggttatccgcaaaagaatcgcgtatggtgcggtatgagaaccaccataataacgataaccaccgcttatgtggtgtgtgttctggtggtgtcgccgtcgctctatttgatcacggctataaccgaatatgtcgatcagttggatatgaatggcaaagtgataaactccattcccatgacccagtacgtaatcgattatcgtaatgagttactgagtgccaggacggctgccctgaatgccacgcccaccagtgcaccactgaacgaaactgtgtggttaaatgcgagcaccttgctgacatcgacaaccaccgctgcaccacccacgccatcgccagtggtgcgaaatgttactgtctataggctataccacagcgatttggcgttgcacaatgcctcgctgcaaaatgccacatttctcatatacagtgtagtgattaagctgataccatgcatagcactcaccattctgtcggttcgattgatcctggccttactggaggccaagcggcggcggaagaagctcaccagcaagcccgccactccgggtgccagtaatggaaccaaatcaccggccaatggtaaagcagcggataggccccggaaaaatagcaaaactctggaaaaggaaaagcagacggatcgcaccacgagaatgctgctggcggtgctactcctctttctcatcactgaatttccacaagggattatgggtctgctgaatgctgtgctcggagatgtcttctatctgcagtgctacctaagactgagtgacctgatggatatcttggccctgatcaactccagcatcaacttcattttgtactgctccatgagcaagcaattccgcaccacgttcacgctgctctttcgtccaaaattcctggacaagtggctgccggtggcgcaggacgaaatggcagctgctcgagctgaacgctctgcggtggcaccggtcctggaaaagggacgacagcagccgcaggtgcacaggaggagtcgtggtcgccgaactttgctcagtcgcctgctgagtgtcctgaaacgcggcagaaggcgctcctccggcgaaggaggaggcgtgggaggaggtggtgcgccgttggccggcaacgatgcggtggaaccagcgttccaggccatcgtggtggtggtggacaaggtgagcggtgccacggagaatcagctgtacaccgccgagcaagctcgtattgtgacgtag

SEQ ID NO: 108 - protein, 540 aa, Drosophila
MASGNNETEPLYCGSGMDNFHTSYKNMHGYVSLVVCILGTIANTLNIIVLTRREMRSPTNAILTGLAVADLAVMLEYIPYTIHDYILTDSLPREEKLSYSWACFIKFHSIFAQVLHTISIWLTVTLAVWRYIAVGYPQKNRVWCGMRTTIITITTAYVVCVLVVSPSLYLITAITEYVDQLDMNGKVINSIPMTQYVIDYRNELLSARTAALNATPTSAPLNETVWLNASTLLTSTTTAAPPTPSPVVRNVTVYRLYHSDLALHNASLQNATFLIYSVVIKLIPCIALTILSVRLILALLEAKRRRKKLTSKPATPGASNGTKSPANGKAADRPRKNSKTLEKEKQTDRTTRMLLAVLLLFLITEFPQGIMGLLNAVLGDVFYLQCYLRLSDLMDILALINSSINFILYCSMSKQFRTTFTLLFRPKFLDKWLPVAQDEMAAARAERSAVAPVLEKGRQQPQVHRRSRGRRTLLSRLLSVLKRGRRRSSGEGGGVGGGGAPLAGNDAVEPAFQAIVVVVDKVSGATENQLYTAEQARIVT

SEQ ID NO: 109 - DNA, 5251 bp, Drosophila
taaccttcttttgaccttcgtaagtcttccactggcacttgaaaagctttgggaaaacagctgtgaatttgcccagcagagcttccgaaacgacggcttttagtacctccgccgtaacaccacccacagtgggtcggttctggtccatggtggggatggtgtggtggttccgatgatacgggaatcgctggagaagcgttactgatgcaatgcactggataccgttcctgttcagatcattgagtactccaggcggcatttctattgtggttacaatagtaagtaaggagtagtaaaagttattctgaaattatataaacggcttgttggggttttaaaaatgttgccggttttagatttagcagtgactccaaccatctgatggggaactttgagcaagtgagctccaatagttttggcgtcgcttccaaaaagctctggaaaagcttttatcaacaggcttgccaaaatccgctatactagcatatgtaaaagaaaaacttgtataccctaccaataggcatacatcgcatcaggacttatttaaccaacaaaaataaaacacaacatgaatgtacattctggtttaatcgctttatttaacttcaactttgaaattcatgtcgcatggcttaacttggttttcacagacgttcaggtatacataagctgacatatacacagtaaatactctaacaacattaaacatatgtatgtacataattaactagtccgtagaaacgtattatgaccatacactcaaaataaatgcgcatagctcctaatctctatatttcactaccgaactaattgatttagatccgatatagaatttgacaacgtttccgaaagagagcctaagagagctggaaagtacttaacgtaaaagctttgacttgcgagtatttcctcaggggtcaccccttacccctttcgcatccttgtgatcctcttccagtggactttcctgctgatcccgcttcttttccgaccgcgaaggtcaactctccgcgctggtcgccagaagggacggcgaggaggtggtcagacccactggaaccgattcctcctgagcctggcccatgggcggtggtgatggagtgggcgtggaggccgtggacgacgccgtcgatgaggtgggacgggcggcgtgaggctggaggaagtgaaacaagttggaatgctgcatgaaactgcccaccgatctcagcggactaaaaaagttctctgtgggatggttggctggctgcggatgctgtggaagtacagaggactcctgatccctgcagagattactgctgggctcgtcgtggacccctcgtcccttagcgatggagctacagttgcaggatcggctcttcttcagcgaactccgagtgaatgccgtgccctttcgatacttaggcttgtgcccatttgagccgggactcgcctcactatcgatcacaaagataccggattgctcctggggagcaggactcgccgtggatcctggcaggcagtgagcgctattggagttgccagcaagcagtttggccctcagaagagccggaagtgggccatttgtgggagatgtttgagtggagagcggtctctccctggactgttcatctatgggaagatcctgattgttgcccattggcctggagtccgtgtcatccgatcgcaatttctccctcatgaccaaagccagggagcgacgcagttccacgggatctatgccaggctgaacgggatttggaacagagctggccggcacgaatacgtcctcaaactccagatcatcatcatcttcgtcctcatcctggctgaaactgtagttgtggttgtcataggaggcggacggaactgagggcttcgcaggagcaggaggagctggtgggactgtggaactgctatttcgttcactgctgcgctgggaacccggagcgggggaagggaactcgtagctggtttcacccagctcggcgccactggaggcctccactatgttccacatttctcgctcgagatctgtggtcaccgaagccacggcggccaccgtttggttgatgttgttgaaacagggcgacaccactccgcacttgggcaggagctgggagttcttcagggcctcctgctgctgcctcaaccaaatgggtgaatctgcagggaatgttacgagagttatagggattttgccacagttccaaggagacaacgcgcactcacactcacccacatagaggcgcggctgcgtggagcgcatattggagtccatggactgcaggcgatgctgactggccaccgagaagcggtggattgcctccgcctgctgatcaatgtccacgcccatcatcttcaggagtaagttcttcagcgcggccctgaagtccttgaggtgataggcatacaggaccggatttaccgccgagttcagatgggacagaatgatgcagaagagcgtcagcttgggatgcacatagcagtcgggacagaaggccttgatgcagttgatcgtatagagcggtatccagcagatcataaagaacagcacgataatggacagattctgggtggccttgacgtcccgcttccttgcggcgcccaagacccgcagcatggttcccgtgtgtccacctcttccgggtgtcgtcacctgcaccacggccgccgaggagcgacgactgagatcggaggcggggttcatcgtaacaatctgacggacctttaaagttcaattgaaaacggatagttaatattccaaactctatggaatatataaaaaactttactggcgaaaatctatctaccactcacctgtttgatgatgacccggtagatgtgcgtgtagaaggccagcatcagcagagccggagtgataatggtggcaaaatagaggaagacgaggtagttgtagtccatcacctccacgaagagacactcctggttgtgattgacatcggcgtgccagccgaaaagcggcaggaagcccactatcgtcccggccacccagcacatggagatgatgactgcaacggaagaggaacattggtaatcagagtgccctgaactgaagcccttgaagtggagctcccccagacgtcatttgagcagattgcaggaatccctgccgtcttcgccaccaagcaccataaaaacttttatcgaattgcgggaaactaaacaaaactggcaggcagggtgagtgcacttcccaaatgacgcaaataattaccaattttccggacgtagcatattggaaagtaatcttgccttgagcggccatttataaagcactatatagtaggtgatatatagtgcttagaaaattatatatttatgagatatttttagctagaggccaattattctgattccaaacagttgctataaacatctaatatgaaaattcttagaatcaatttgaatctagttaggctagtaagactattatgttacggattttaaggatgtttattactgtgtactgttctcattgcgtccattcgtggtagttcaaatgaggcgtcttttgtttaactcaagtcgcaactcaaacatggtcgatggccggaatgaaacacaatgtgctgtatattagccatccagagtcattagtatcacggcaacaaaggcacaatactaaacaatggacaacttaaagtcgaaatagtttgacaaatatcctgacaagtaggtgaaaccagaaaactggtcctttaaagtgggttttagcataccattttgtacctactgattttatacaatacattgtatatacccccatatatacttacatatcgccgtgcgggtgcggacattccttgagtaggccatcggatataggatggcccagtatcgatccacggacacggccaccagacagaagatggagatggtacacagcaccacgagcagggagactgtgaagaggcaggcatgaaggtttctgggtagtcccatggaggccaggatggcgaagggaatacccaatgcgcccactagcaaatcggccatggccagggatactatgtagtagttggtgcggcgtcgcaactttctttcccggcggaagacgatgatcaccagcacgttgccgatgatgctgacgatggccaccaggacctcgaagacggtgtagggtatgttcagctcggaactggggctgtccgagtccttggcatccttgctcgtggtggccgcgtgcagcggtagcagaggtccctcgaaggagaaatcggtgatcgagaagtagcgaaacgcggacatggtgggcggtgttgcgggtattttacgggttccacggggttccctgccccgatcgagtatttaaggctagtgccgagctaatgaaagggcggaacaggtgtgggcttcaattacagtgcccgctggcctgtgaactccctaattgacttgaggtggccgtggcagtagcagcgatagtaatagcacatgctgcgcattgcgtatacgccatgcccgccgcgctgcggttgctcctttcccgctttctcgcttttccgattcgcttttttcgctctcgctctttattttcctttccgttgatgtatttgtttttctgctgtcgacgtaccctattaagctggaaaaaaaagggaaaacttaatcatcgttcggcacgtttgttacacacatgcagcaacttaattgtagcaattttttagtgtaataaattgataaatatttgccaaaaaatacatgtccatattgataacgtgtgcggcgagcaaaacaacaaaggccgtatcacaactatgcaataccctagataatcggccagtacttgagtatattatttgaaaggggccatcagttgcaggtcttccttaaagccagcagctcaaggatcacagtgaaatatgttggaacttcgatggcttttacgatgatggtgtttctggtttggcttatggggtatatatacccgcaactctgcgagtacacactgccacactatctgattcgcgtgcggcaaatacaaagctcgaaaagcaaacaactcccgactagcaacaaaatcaattgccagacaatcgaaccgggcgctgcagaacataataaaagtgtataaaaaggacggaacagcgagaacaacgcagaaacagacgtcccataaataaaagagcatcctacacagagaaaaaagaattaggcaggggtttacgaaaataattcatattcaattcaaaagtattcgctttttttgtaattattaagatagatgatgtattgctcctaaaaactc

SEQ ID NO: 110 - DNA, 2325 bp, Drosophila
atgtccgcgtttcgctacttctcgatcaccgatttctccttcgagggacctctgctaccgctgcacgcggccaccacgagcaaggatgccaaggactcggacagccccagttccgagctgaacataccctacaccgtcttcgaggtcctggtggccatcgtcagcatcatcggcaacgtgctggtgatcatcgtcttccgccgggaaagaaagttgcgacgccgcaccaactactacatagtatccctggccatggccgatttgctagtgggcgcattgggtattcccttcgccatcctggcctccatgggactacccagaaaccttcatgcctgcctcttcacagtctccctgctcgtggtgctgtgtaccatctccatcttctgtctggtggccgtgtccgtggatcgatactgggccatcctatatccgatggcctactcaaggaatgtccgcacccgcacggcgatattcatcatctccatgtgctgggtggccgggacgatagtgggcttcctgccgcttttcggctggcacgccgatgtcaatcacaaccaggagtgtctcttcgtggaggtgatggactacaactacctcgtcttcctctattttgccaccattatcactccggctctgctgatgctggccttctacacgcacatctaccgggtcatcatcaaacaggtccgtcagattgttacgatgaaccccgcctccgatctcagtcgtcgctcctcggcggccgtggtgcaggtgacgacacccggaagaggtggacacacgggaaccatgctgcgggtcttgggcgccgcaaggaagcgggacgtcaaggccacccagaatctgtccattatcgtgctgttctttatgatctgctggataccgctctatacgatcaactgcatcaaggccttctgtcccgactgctatgtgcatcccaagctgacgctcttctgcatcattctgtcccatctgaactcggcggtaaatccggtcctgtatgcctatcacctcaaggacttcagggccgcgctgaagaacttactcctgaagatgatgggcgtggacattgatcagcaggcggaggcaatccaccgcttctcggtggccagtcagcatcgcctgcagtccatggactccaatatgcgctccacgcagccgcgcctctatgtgggtgagtattcacccatttggttgaggcagcagcaggaggccctgaagaactcccagctcctgcccaagtgcggagtggtgtcgccctgtttcaacaacatcaaccaaacggtggccgccgtggcttcggtgaccacagatctcgagcgagaaatgtggaacatagtggaggcctccagtggcgccgagctgggtgaaaccagctacgagttcccttcccccgctccgggttcccagcgcagcagtgaacgaaatagcagttccacagtcccaccagctcctcctgctcctgcgaagccctcagttccgtccgcctcctatgacaaccacaactacagtttcagccaggatgaggacgaagatgatgatgatctggagtttgaggacgtattcgtgccggccagctctgttccaaatcccgttcagcctggcatagatcccgtggaactgcgtcgctccctggctttggtcatgagggagaaattgcgatcggatgacacggactccaggccaatgggcaacaatcaggatcttcccatagatgaacagtccagggagagaccgctctccactcaaacatctcccacaaatggcccacttccggctcttctgagggccaaactgcttgctggcaactccaatagcgctcactgcctgccaggatccacggcgagtcctgctccccaggagcaatccggtatctttgtgatcgatagtgaggcgagtcccggctcaaatgggcacaagcctaagtatcgaaagggcacggcattcactcggagttcgctgaagaagagccgatcctgcaactgtagctccatcgctaagggacgaggggtccacgacgagcccagcagtaatctctgcagggatcaggagtcctctgtacttccacagcatccgcagccagccaaccatcccacagagaacttttttagtccgctgagatcggtgggcagtttcatgcagcattccaacttgtttcacttcctccagcctcacgccgcccgtcccacctcatcgacggcgtcgtccacggcctccacgcccactccatcaccaccgcccatgggccaggctcaggaggaatcggttccagtgggtctgaccacctcctcgccgtcccttctggcgaccagcgcggagagttga

SEQ ID NO: 111 - protein, 774 aa, Drosophila
MSAFRYFSITDFSFEGPLLPLHAATTSKDAKDSDSPSSELNIPYTVFEVLVAIVSIIGNVLVIIVFRRERKLRRRTNYYIVSLAMADLLVGALGIPFAILASMGLPRNLHACLFTVSLLVVLCTISIFCLVAVSVDRYWAILYPMAYSRNVRTRTAIFIISMCWVAGTIVGFLPLFGWHADVNHNQECLFVEVMDYNYLVFLYFATIITPALLMLAFYTHIYRVIIKQVRQIVTMNPASDLSRRSSAAVVQVTTPGRGGHTGTMLRVLGAARKRDVKATQNLSIIVLFFMICWIPLYTINCIKAFCPDCYVHPKLTLFCIILSHLNSAVNPVLYAYHLKDFRAALKNLLLKMMGVDIDQQAEAIHRFSVASQHRLQSMDSNMRSTQPRLYVGEYSPIWLRQQQEALKNSQLLPKCGVVSPCFNNINQTVAAVASVTTDLEREMWNIVEASSGAELGETSYEFPSPAPGSQRSSERNSSSTVPPAPPAPAKPSVPSASYDNHNYSFSQDEDEDDDDLEFEDVFVPASSVPNPVQPGIDPVELRRSLALVMREKLRSDDTDSRPMGNNQDLPIDEQSRERPLSTQTSPTNGPLPALLRAKLLAGNSNSAHCLPGSTASPAPQEQSGIFVIDSEASPGSNGHKPKYRKGTAFTRSSLKKSRSCNCSSIAKGRGVHDEPSSNLCRDQESSVLPQHPQPANHPTENFFSPLRSVGSFMQHSNLFHFLQPHAARPTSSTASSTASTPTPSPPPMGQAQEESVPVGLTTSSPSLLATSAES

SEQ ID NO: 112 - DNA, 4314 bp, Drosophila
gagccaattcttttttggctttacgtgacgttggcagaacaaatcgtttttgttttagccatctgacttgtttgctcctttatggcccgctgcgctttggactttgacgcatttgcgtcgctttaatgcgattgctggttgctcattacggccaatccttactagtacttgcactttctgtgaattcgtctggggtttccatttggctgattgcattttcataacaatttggaggattactaatgcgccacgttgtccctgcatttgcatgaccttgaaccagtagccacctcattagaatttcatttgtagtcaacaaggcgcagacgacagggccacaatcgataaaaacccaaatgtattttatggccaaattacatttttactagaatgaatccatagaaagatgcggaaaataagcgggcgcggaatatgctaagctttatttgcagccatgggaataatcttaatacagcaaattcatcctttaaggtatctctagaagtaagtttagtaagcgaactttgtccgtcatttccattgagttgaatgctacattttcgaaatcttattttaaatgcgattcaatacaatatacagaatctactatgtttaagatcgcaacatttttttttacactttcttaactaaacactttaaaagcacatctgtgttacactttggtatgcatgtgaaacatttggttaactaaaacatatatctacgcaatttaaaaggcgatctattaaatttcaaggggcaagcttttcgtttttaaatttaattcctatatttaaatggtgggcgttcactagtgattgatttatgcttaccattatcgataatattattaagttatatccgcctcaggcttgtttaagagtaaatcccccgagctctgaccaaagtttaattttaagagcgccagtatgctgaatagtatgagtcaaaagattgaatattcttagactgaataattctgaatacttgaaagactagtttaggagtttttccagccgttgtccgcagctgaatgaatgaaaaacttaatgcttaagggagagtgtgcgctcgactgtgattaacttttaattgccaaatgcaaatgaatgcaaaagcagtttaaacaaaacgctttggtagcagcagcaatagcaatagacgacaaataactggcttaaacagaattcaaataaattagcatcaggaagccgcacgagagagtgagttcgagtttatcagttagttgacttggacaccgatcatggcgtactgagcggcgactggcggcttgttcgtcggattctggatgtggagtacacatagagagagagagagagagagagagagccagttaatatcgaacctatccattgattatagggggcacttgcctgcattatcgacggtttcggctgctccgccgactcaatggagaagcgctgcgtttgactggaattggttagtgccctcctcaggcggcgcgattcgatgttgtttcgcgaattcagcgaacccttcgataccttcttgccaaacagaacggcctaaaggagtgggaaatcggtaaggtaattagttaaatagaaaaattcagacattcgaattattaataaatatattaataaatatatataaatatttataatacagataaatttgaaatatagtattgcgcatactataacccccacttccgttttactcaccttgaatgcctctcggaacttgtggctcataatgttatataacagcgggttgatgcaggtggacaagtagtagaggacaccggagacataggtcatcaccgtgtagacaaactcgtgctgatcccgcagtttggccccccgtgcaggggcgtagatggcaatcagtcgctgggcgtggaagggggcccagcagaggaagaagcacaccaccacggccactaaaggggaggggggggcggtaaaagtcagtgacgtggggatgaaaatggaatggcaatggaaatggggaagacacagcgagagtcacagataaagagtcaacgattatattttttggtaatcgcaattgtcatcataaatggagagtgccaaaatgacaaacgcagtaaattggctgcagacgggttgattagcccagcttagggcatatggtcaaacagttggcatacactgagcaaaagttgaagtaaagcttctaaaatggttcttcattgcatataaagaaagatttagatatcatatttcagaatttttaatttgcaagacttttgtgagaagactaaaccttattaaaaacggagtcttctacttttgtttttgtcaaaatttcttactaatttaatcatctgaatactattaagtcatgtttacttaatggttagcggtttagagatctgtcatttaatttgtgatacccccgtactattgctggtatttttcgccagtgtatatcgtgctataattacctagcatcctgagtactcgccgggtgccatagtgattgagccgacctctcaccgagctaagttgagcccccgagccgcccatcaagcccgctgtccctgctccacttcctccgccgttgaaactcatagcggtaccggatccaccatagcgatataggatcgtatcactgggcacactcttcagctgctgccgtctggcaaccgaggcaggaccctccaccaaagtggatcgatacaggtgcacaccgataagtaggtacaacactaggataatagacatcggagccaggaagaatatgaacgtggacagctggaatgagtgcttcactatgacccgcactatgccgcattgctccactcccgaatagtgctcgattccaaattgggcagcctgcggaatggccgtaactatggccataatccaaaccaggacgatgatgcgaatggcgcgactgagtttactcatggcctggcccagaaacggatggcaaatggcaatataccgctccaccgtgaaggccgtaatcgttagcaccgtggcattcgccgatgtctccgccaacagaccacgtccgatgcagatgtactccccaaacacgtacgggtacttggaccagatgtaggacacctcctgcggaacgcccgacaacaggagcaggaaatccgagatggccagcgaaaagaggtagtaattcgtggccgtgtgcattgaacggttcttcttaatcacaatgcaggtacttatgttgcccactacaccggttatgaaaatgagggagtagaccaccgttacgggtatcacgatggccagcggatcgcgtggcggtccaagatcatggctcatattgccagcggacatggcgccggcggcctggaatttttccccttttgttttcacaaaatttccactaacagcgctaaattccactgccgtttaactgctgcggctccggctgcgactcgatgtcccctcaactatgctaattataataatttattggaggcgaccgggcggaggagggacaggtctggactcgcgcttcgcaatgctagatactcgattctaagattcagatactcgactggcacgcaaacgcaccaaattaccgacgaggtcgagatccgtataccgtattcagtattcagtattccgtattcccggctgtttttctagggggcccgacttctcttcaataagttatcgagttaatttgatttcgattcgaattctgattcccgagagcagcctgcaaccgcactccagcgcgctccaaacttatctgataagccgcggcgacatttcattcagatttgtatctgtatctgaaagccagcgacgaagcgtcgctgtttttccctcacatgaacgcggaaggtgagcgacatggttgtaatgaccgagcgtccagcgaacgtgccggctcaattaaatcttgaaaagcggcgatatcttgatgggactagccgatgttagagactaagcacaatggctccgaatacaacgcaatttttgggtaattaaaaaggctaattaacaaaaacttgtaataatgtttgctttggcccatttataaaacacttagttgggaattttgactttgtgatgcacataatcctaaataaaccacgataatgtaaacaacacatcttggaattaaaagccaaaataagatgcaataatattagatgatgcaataataccaaatgaccgaaggccaccgtgcgtatgagtaatgtccagccagcttacttgttagcttataagtaagaatattgttctttgtttatcttactaaagtatattgaaatgtaaacaaataataataattacaattcaaatctaatttagattaattaaa

SEQ ID NO: 113 - DNA, 1287 bp, Drosophila
atgtccgctggcaatatgagccatgatcttggaccgccacgcgatccgctggccatcgtgatacccgtaacggtggtctactccctcattttcataaccggtgtagtgggcaacataagtacctgcattgtgattaagaagaaccgttcaatgcacacggccacgaattactacctcttttcgctggccatctcggatttcctgctcctgttgtcgggcgttccgcaggaggtgtcctacatctggtccaagtacccgtacgtgtttggggagtacatctgcatcggacgtggtctgttggcggagacatcggcgaatgccacggtgctaacgattacggccttcacggtggagcggtatattgccatttgccatccgtttctgggccaggccatgagtaaactcagtcgcgccattcgcatcatcgtcctggtttggattatggccatagttacggccattccgcaggctgcccaatttggaatcgagcactattcgggagtggagcaatgcggcatagtgcgggtcatagtgaagcactcattccagctgtccacgttcatattcttcctggctccgatgtctattatcctagtgttgtacctacttatcggtgtgcacctgtatcgatccactttggtggagggtcctgcctcggttgccagacggcagcagctgaagagtgtgcccagtgatacgatcctatatcgctatggtggatccggtaccgctatgagtttcaacggcggaggaagtggagcagggacagcgggcttgatgggcggctcgggggctcaacttagctcggtgagaggtcggctcaatcactatggcacccggcgagtactcaggatgctagtggccgtggtggtgtgcttcttcctctgctgggcccccttccacgcccagcgactgattgccatctacgcccctgcacggggggccaaactgcgggatcagcacgagtttgtctacacggtgatgacctatgtctccggtgtcctctactacttgtccacctgcatcaacccgctgttatataacattatgagccacaagttccgagaggcattcaaggccgttctgtttggcaagaaggtatcgaagggttcgctgaattcgcgaaacaacatcgaatcgcgccgcctgaggagggcactaaccaattccagtcaaacgcagcgcttctccattgagtcggcggagcagccgaaaccgtcgataatgcaggcaagtgccccctataatcaatggatagctgcggacaacggctggaaaaactcctaa

SEQ ID NO: 114 - protein, 428 aa, Drosophila
MSAGNMSHDLGPPRDPLAIVIPVTVVYSLIFITGVVGNISTCIVIKKNRSMHTATNYYLFSLAISDFLLLLSGVPQEVSYIWSKYPYVFGEYICIGRGLLAETSANATVLTITAFTVERYIAICHPFLGQAMSKLSRAIRIIVLVWIMAIVTAIPQAAQFGIEHYSGVEQCGIVRVIVKHSFQLSTFIFFLAPMSIILVLYLLIGVHLYRSTLVEGPASVARRQQLKSVPSDTILYRYGGSGTAMSFNGGGSGAGTAGLMGGSGAQLSSVRGRLNHYGTRRVLRMLVAVVVCFFLCWAPFHAQRLIAIYAPARGAKLRDQHEFVYTVMTYVSGVLYYLSTCINPLLYNIMSHKFREAFKAVLFGKKVSKGSLNSRNNIESRRLRRALTNSSQTQRFSIESAEQPKPSIMQASAPYNQWIAADNGWKNS

SEQ ID NO: 115 - DNA, 5927 bp, Drosophila
ttaagccacaaaatgattgaaaggaaatgttgtggggtaaaagtaaaattctcagatcgatgagtacaatgtactatgtacttccctcggcagctcctgctgtgttccttcagccgtttgtgtctgtttgtccctaaagtaattaaaagtaagtaaagcaaagtcaccccctcgtcggtgggcgtggctgtccagtgatttgccacccgcaacgatttttttttccagtactttcctttttttcttttttttgcgtttatgcaaatggccgctgaccaaaagaattaatgcgtcccgaaagtgagttgaattggaatgagccgcaattctcggagtccaaaaactgcgggcagcctgtcagccgtctgttttcacttcttttgcgggcgggacgaaacatcaacgaatgtcaatgaatttacaggggaatgctataaaaagcccgaccaaacaaaaaatgtaaagcccgtaattccccattgtctcagtgcgttgctaatttggccatatctttaaatagccagccgaacggaaaggaatcatttgtaatttaaagtccaattattgtgccatttgaggggaaaactgtggcatgccagggaatggaatgcctcgtaagccacatcgctgcacttcattaaattgacgagacaaaagatctctacacatacaataatggaaaatatttgttccacaataaaaggggttgaggaggcactttgtgttaatgcccaacagctgcaaatctcggtctgcggcggccttaaaaatagagaaatgaagatggacggtccgatgatgatccgcttggctgaaattattctgtaaattctacctatttatatcgtaaatatagattttgatgctgatgccgatgctgcgcgagtaaaaccaaattcggcccacgcggcgtatgcgcgtttttcgcacttaactcattaaaacgtttgccgctggcccattgaaatttaatgggaaaacacgcgctgtttttttttttttagaaattcgcctcaatagattaagctcgtaaattatttaattgcattcttgatttttgatttgaaatcaaaacattccctcatttaaaaactcattaggaatagcaatggaaacgtggttgagcggatgtttatattgtagaaaaaaaaaatatatatatatcaaatatatgaaaaaggttttgaagtttgtcagtcaataaatcaatataaagccccacttaaaattacgacacaaaagtttccatcaaacgaaatgcaaacgaaaacaatgctctgaaaatatttcatcgatatattgaccgagcactcagatgtcgtcacttgaaggacccttctcgtccagcccccgagtgcaccaaccccactcaccttgtagaaggccttccggaaattctcggagaggaaggcgtagagcagcggattgatacacgagctgctgtaggccagagtctgggcggtgacctggatgactagcttggtgagggtgttcgtctcgatgacatccagtgacttgagcagcaggatgagctgttcaatcaaacgaaagaatatgtttgattatttaaaatatatgtgggtttcatatgtattattgcgtctcacctggacaggcagccagagcgaggcgaaggcgatgaccaccacgacgacgagtcgggtgacccgcttgcgaccgcgctgcgactccttggacatgcggacgccggttccctggcgccagagccgcatgatcatgcgcatgtagagaccgctgatgatcatcaggggcagcaggtaggagctgatgaagaaggtgacctggtaggtgcgcggaccaaggaagtcgttcgtcgtgaaggtgcacatgccgtaggtgatgttcttctttgcatcgtaatccacctgcggatatcgatgagaatgtggttgtgggaactatgaagaaacgtgtgcggtgtgggaatcgaatattgcgcatacgtcatgttggcggtgacagttgcatggcagccaagcaacgtcaaacggccaacagccagacatcgtaaataaaactaaactgtcatacgaatagttcggacgtcgacaactaactcgcaatctcactttgtttctctgtcgctgacatttggctgacaaattgttcagccggagttttggatttggataaaagcgcaatgggtatgggcaatcgggctttcgaggcttgttgtttgggggatggagaatctattggtctgttggctagacgagactggtttgctgacgcttaggagggtcgtaaactgcccggtgaatcgtaaaaatattcgcagccttttgtttacatttttgtttacaatctccgccccttcaccgcgctttcaatcgatgaatgcgtgtggaaaattgcatttaaaaaatcttcccattaatgccggcatgaattgcttacaaaaatgtttgtttatggcccgcccttgttttcgttacactgagcgagcgatgttggcccacaaattgagttcgaactctgaatctgcgcagcgtcaagtggccaaggccacagaagtagacaaatcatggccagaccctccgctgatttatgggttcatttcgctggcatgttctccgcaaaacccaacgacttcatagacttgacaagccattaatgccctttcctcgttcgcgagaaatcagccaacagctgtcaatcaatgccatgacctggagatcgcatatctagttacgcagtcggacatatgtgcatttatgattattatttgatatcgatttctaataaaaagataatggcacacgctctcacaggctcatttgatatgcatataccaagcatgtagctgggcaatgtaatatggaaataattaatagcaaactgttaattaacatgttgatcaaacatgacttaattatgcctttttatcgcctgttcctttgtatttgcacacgcagacaccagataacaaagcaaagcacacatatgagcattcaatgtgggctctatttttccagcttaatccttagacaaagcaaagcaaacacataaacaaacaataatgccacccattggagcactctccccaatgcgaacaaaaaccgaacgagacaaaaataacaatataacgaagcgtgaaatgccatttaataaaatattaggttacaataacaacaccgggagcaacagtgggccattgccatctcacagataaaaaaagttcatcatccgtgtgaagatgagattcgtttaattaaccgcgactgtcgcttttggccaaggaaaaggggaaacacaacggcacaaacaaaaagttggtcatgtgtgatgtgggaatcgctttattggcactgggaaatcagtggaaaaagcccgcgggccatttatgagtatcaacagaaattggaaccaatgtccgaccataattacgtgtagttgatactcgcaatgaaaaaatatgatagatattcagtattaaatagcactcaacaattgtttgaactgtaccggaaaattgaatattagttaataatcccagtgttttcttgcgaataaaaacttaaggttaaagtctgcaaatacaaatacattgtatatcctcaaaatcgccggtaaattccccttttcatttttgatatcacccgctgatctcgagcaaaacaattccgatcttcgtcgattattccgcaattaaattgtttctcgcacttttcgcatcgatcataaaagcctaatgtccaagatgagcatttcaaggtcgccacccgcgaagacatttatcatacgcagtgtgcgcccaaagttcgcaagtgcaaagtttccataatggccgcttgttacgacttacgactgcccatgatttacgcgcttttggatcaacagttgaatttgaaattttgcaagccacacggagaggaggtgggcagatatgggcagataccgcccagttggcaagtgtttctcgctggctatctggtctataattaaaaatttatgaattcaaaatagcaaattagtaacaaaaacaaatcgggcgccgcgcatcgcgaaattttcaatataaacacaaaacagaaaataagataaaatggggatactttaataggggcatatagtaaaaacaaatgagttgtatcaggatcagtcgattggacgatcgctggtttgtgcggggtcttcgctttctggattacgatctggcagaaggcagaccatctatctaggtatctatagctacattagaaccaggcagtcggcaccattgacgtgcagcgagaggaatctaacgaggtgacgatgatggaaagcaataaatttgcctggcccgtgttcttcacagcaaattcaggcacagcaggcccacttatagcattctacccactcctcccactcttccactcccacttaccaccacgtcgtgggtgaaggccactggcaccgaaacgaccagcaccacgatccacagagtcacgatggcaatcagggtaatgttctccgtcctcatcatccgcgagcgaatgggatgaaccaccgccaggaaccgatcgatggacatcagcaccagcgtgtaaatggaggcgaaggcggtcaccacaatcaggtactggacactgcggcaccagaaccttccatatggccagtagtacaccatgtaatcggtggccgtgaagggaatgcagaggattacgaacatcagatcagcggcagccagattgacaatcatcaggttggtggtggagcgcatgttgttgttgaagaccaccaccaggatgaccagcaggttgccgaagaatcccgtgatggcgatgacgccgaagaagaatcccactatccacggcaaagtgccattgatggccagccactcttcgtcggtgaagaatgaggtgatattctcctcatttctggttgcatttaggctaatattagccagcattgtggtgttctccatgttttctcagctttagtgcacaactttccggttcactttgtactggctattggcgatttcgcttgattgtcacgggacattttcaattttgggctctttttcgctcacagttcatcgaacgcaaataacaaatttccaattaggagagtttcacaaagcagccgccacaaaaattcaattatcatgcggaatactacgaccgttgagcttcggagacctcaaaaacgtttcgcatacgccgtgtggtatcgaactcgaccggaattgttcgcaacgtggcgggggcaaaagcaatttggtccttccacgataacggtaattgtaggtgggtagcacaggtaagacaacaataaaggacagcacacaaggatcacggtgaggcgaaaggcaagagagtgagtttaaaggtgagggcacgtgcaaacgacaccgacacagccaaactgtgccgagtcacaccctgacgacaaggacaccggggtgtccttaggttcgaggaccacgttgctgcacctacaccataaattcaatatgatgtcttcctttcgctgcgtttctgtttacatttctcgtttgcttttttattgacaaacgaacggcataaattttggggctataaggctatggccaaaaaaccacgttcctattgttgctaccgactgctgcgccgcggtacgctatatattttcgattttatactgctgcttttggccaattcgatagtccacactgctcgcgtccgtatccagcgcccaactgattgctggctgagcttgttgaggaatacttcgatgcctcggcggcggcaaaacgccggcagcgacgccagccatcccagcaagaataatggcaacaatagcaacaaccagcgcagctggcatctgtgcgtgtgatggttttgggtggccgccggagccacctcttcctcctcatcctcctcatccgatcccaatccccatcagctgggctggaatgtttgctcttgttgctcccaccgcta

SEQ ID NO: 116 - DNA, 990 bp, Drosophila
atggagaacaccacaatgctggctaatattagcctaaatgcaaccagaaatgaggagaatatcacctcattcttcaccgacgaagagtggctggccatcaatggcactttgccgtggatagtgggattcttcttcggcgtcatcgccatcacgggattcttcggcaacctgctggtcatcctggtggtggtcttcaacaacaacatgcgctccaccaccaacctgatgattgtcaatctggctgccgctgatctgatgttcgtaatcctctgcattcccttcacggccaccgattacatggtgtactactggccatatggaaggttctggtgccgcagtgtccagtacctgattgtggtgaccgccttcgcctccatttacacgctggtgctgatgtccatcgatcggttcctggcggtggttcatcccattcgctcgcggatgatgaggacggagaacattaccctgattgccatcgtgactctgtggatcgtggtgctggtcgtttcggtgccagtggccttcacccacgacgtggtggtggattacgatgcaaagaagaacatcacctacggcatgtgcaccttcacgacgaacgacttccttggtccgcgcacctaccaggtcaccttcttcatcagctcctacctgctgcccctgatgatcatcagcggtctctacatgcgcatgatcatgcggctctggcgccagggaaccggcgtccgcatgtccaaggagtcgcagcgcggtcgcaagcgggtcacccgactcgtcgtcgtggtggtcatcgccttcgcctcgctctggctgcctgtccagctcatcctgctgctcaagtcactggatgtcatcgagacgaacaccctcaccaagctagtcatccaggtcaccgcccagactctggcctacagcagctcgtgtatcaatccgctgctctacgccttcctctccgagaatttccggaaggccttctacaaggcgaatttctaa

SEQ ID NO: 117 - protein, 329 aa, Drosophila
MENTTMLANISLNATRNEENITSFFTDEEWLAINGTLPWIVGFFFGVIAITGFFGNLLVILVVVFNNNMRSTTNLMIVNLAAADLMFVILCIPFTATDYMVYYWPYGRFWCRSVQYLIVVTAFASIYTLVLMSIDRFLAVVHPIRSRMMRTENITLIAIVTLWIVVLVVSVPVAFTHDVVVDYDAKKNITYGMCTFTTNDFLGPRTYQVTFFISSYLLPLMIISGLYMRMIMRLWRQGTGVRMSKESQRGRKRVTRLVVVVVIAFASLWLPVQLILLLKSLDVIETNTLTKLVIQVTAQTLAYSSSCINPLLYAFLSENFRKAFYKANF

SEQ ID NO: 118 - DNA, 7383 bp, Drosophila
atcttttaagtaaaaagcgctcaagtcaaaacttttactttcatttaaaagtaaattttcttgatgtttcaaatttatagcaaaatgccataatttcagttcgtttgaaacaaacgaaatgaagcggaaattgcgaaccgaatttattcgtacaatttatgggccacacatgaacaataataattcattcggctgcatgtaattaagaataataaaaatactggtatattttgtttgtttgcttaatgactcgaaatgtttattcgttttcgtttggtaattaaatacaataataattacattaataagcctttctgttttttaatgacaaatattgtacattacatttgcttacatccagctgtgtgcttgtgtaggatttaatacataatcggattgttgttaaaatactatttaaataatttaatttaatgctacttaattgatttcaggtgctaatttaatttgattcattttttgttcagctaataatacatttgatttggtgagttttggtttgagtttgataaggtcattaacgaatcgattatttacaacgtttggacttcgtgctttaaggatcgcaatttgaagataccattattataatactgtacacggctcacgaccagcattcacactcattcaatatatatccttctgcgaaacaattatcagcaatgggacttgtaatcacaattcattaagacgaaatcacagaggcaaatggtcatgttccaatgacacatttagttgcgggatatctaaacactgtaaaggggttttactaaagccttacatacaattacaataaaatttaaacatattagtgtagtagctataccctaataatagtcattcactaaaacattaacacacatacgttaaatgaatgagctatgacagccaatttactggaatacacatcatatgtgaatgccgactggctgcggaatgtgtcattggaacacggctataacttagatcgctctagtttaaattaaagtggttgccacaaggacttgcccgcatccttgtccttcgcctgcgagccgggcaggtggactcgcgacacctcgctgagtatgcaggtgccatcgcattcggtttggctgccaaattcctgttcgcaaatgcagctggagctctccctgcttagcagggccaactggactccggccccggatgccaactcctcgctggggggcgtggttgatggcagctccatgagtgccacgtcgtcctcgcattcgattacgttcggatgcagaggtttgaagttgtttcgccgccacggcggcattgcaacgccaacacctggtgccgaaacacccggagtggccgcaaaggtaaccacgctttgatgctgatgatgttggccattgacattgttgttctgcccactacttccgttgtaaatgccgctgttagcaccggatccatgcacccgcggcatatgcaagcccggcttcccattgttgacaccaccacgcgccggaccaaagagattactccggattcgcatcgaggagttggcgtaggttgaccttatggagctggcgcgggtgtgcatcgaaaaggtcctttcgtgggcgtccatgctcgtcttgaacttgcagaaacaggccgcaaatcgcttgttgaattcccgcttaaatttttcctgtgcagagaaaaatagacgacggtttaggttaatccatcccaataacatatcactaaagtaagcgaaagtacttttattcacttaaatacaaattaaagtgcattgcataaatcataaacctcttagcaaagtttatcatttgcaaaaatacattttttcgctatcaaactttctggttaattattatgtgaattggcagaaaatttttcgtgaaaaagcgaaaactgccccggctacggcatctttctggctaatgaaagtgctctaggcaaacctccatcttcgctgacaaatcccatttgtcttcgctgacagtaaaatagaatatctgttgacaaagtttttcacgcacagccagcaggggaaaaagtttacgagtttattcggagatctggctctcaatctatcttttacagacaatttgagtgtcaaagcaaacagccgacgggttttttcccgcttttatcggtttgccactttggcattctgaggatttttgtggatttcgcttcagttttgcggtttcacaatttctgcggcccagacggtaggtgtttgcttattggctacagtggagcgctgctttaattaactttgacaaagtatttttttgtgtcagctattttaggtgcgaggcgaaaagaaattggaaattgtttcaaagtaaggcagaagttatttttgattaaaaaaaaagtgacgcgtatgcttataaatcagcgagaaggaaaatgggaaaacatcaacaaagcaatcgattcgcttacaatgaaattaagttagacatatttcattcttttttaagcttctttgatttttgagaccatgaaaacttccgtaaaagtttcatttgctttgcgtctatgtttgtgtttcatttgatgagataatagaaaaagctaattttggaagcacgtgcaaaggctttttttcttttaggtctaaaagtacgaaaataatatagaaaaaattactttttttactttaacttcattattaaaagcaagacgttaagtatgtagatattttgacgagacatccaattgtacgcaaggcaagttttcccaagatcccctgtcaataactgactcacccaaacttaagttccccaaaactaacccaaggcgaccttgagtccctcatcaatccccacatttccccggcaaatttaccacacatttatagacttatgtctttttagtgcgtgtgcaaagaacgtgtccctgagcacgaacaaacatccaaaggatgtcaatcaaatcccagccagacaaatgcaaatttaacactccgtaaacaaatcatcatcatcattggagcccacacttacattgtagatgccataaataaagggattgtagcagctattgctcatggccagccaatcgcagcaaaaccagacgatgctaatgaagtggtagtcgttgatttccggtatcgtgacatacagaatattatagagctgcagtggcagccagcagagtccaaagataatgaccacgataatcagcattttgatgacctgcaagcgtcgcagaaaaaggaaattaaacccagtcccgatttgcataccacatcaacgtgcaaaactcaccttcttcttgtttttcaacagcgttatgtcccgtgaatcctgtgcgttaccaggagcacgtgtgccccacaatcgtaccgccatctggatgtagacaaagctgatgacacagaatggaaccagatactgcacaaaaaccagggtgtagcgaaaggattgcaattgatcatcggataggttcttgttcatgcagaatggccgcgtcacattgtaggtctcattgttctctgttcaaaggatgaaattcagttaaggtcgctggcacttaatccatgcaagttgacgtattgacttaccgcgaaatctttcggtcaactcctccacacgaaaggcaatggcaaagggcaccgcaaatagcagggccagcatccaaattccaccaattatgaacttcgatacgaacttggtgggacgtgccctgcatgcgtaagccgatttttaatgattatgattgacgaatcgaatcgtttcgaatgtgggagcccactctcccccccagcgactcacctaagtggattaatgatggccctatgccgatcgattgcaatggcggtcagcgtgaataccgagacatttacactcagggcctggacgaaggggcagaagctgcacatgaaccacggcaggttccaactctgcagcagggcagcctggaactacacggaatgaaaatattgcaattattagtttaaagtattgcagattatcagaaacaacttgactatacaactatgcctaacctttagcctgagcatgatgtttacaaatcacaaataatccctttaaaatgttcactatatatatattcattttaattaaagtgtaaggaaataggatagctacaagtgagtcgtccgcctgaggtttgatatgatttaatcaacccaaaattgcgactccattcaagtcacacggcaaacaccattaatgaacagtggaacatgtcgggggtgttgtattttcggccagtttcaacatttcgtcgacaaataaacgctcgaaagcccagcggtgttgttttggacactgatttgcgcaggagtgagtgaaaaagtgtgtgtgtgattactgcggatatttgaagaccgcgctttctccgttctccacacaaagtcggccgcaaattgcaatttctcgccggcttattgatgacacttactggcggctgtgacaggaccaaaaatctatttgattgcggcattaatataaattaagtgcccaaaatgtggctggctttgggtcaagttcaaggttcaacgaagtgtacagattgagctttattagtatgaattctgaggtaaaaatcaatttactatttttatttgaaacatagaaagatgtaaacaatttgtactaccaattaataattatttcgactattcagttcgatggttacattcaatattttacgtctaaaacaagctaaaatgcaattgcggcattctgcgaaacgagctgaatacaaagtaacgattcaattactttattcaaatgtccattgctcattgattgaccattttccgactaaacagtattttcaaagcaaactgcgttcgcgttttgcattcgacgacaccagggaatcaattgaagataatggcaattcaattactcggtatcacatacaaattccaaagaaagcccagaaaactgttcacatagcttttagcactctattttgggtactttatagaatacaaatcccattaacacataaaccgaaaatcacatttaaatttgatgtaggtaatattccattaccacaacttttttcgacaagatgcgcgtaggccatggcaattttctaatgccaaacatgagcgctcgttgcccggaaattaaattgatgccggattatgctgaaattggtgtccctgcgcactgtgggtttcaaaaactgggctggctacctttctatggtgaaaataagcgaaaactaatgctaatgttgttggcttgtgtgatttatgcgttaaagtcgatatccatttactagcgcaacagtgcgtatgggcaattttgcatgtatgcatttcatatccgcgaaaaaaaaaatctcggtaattacccgcattataattaagcttaactgttgcaactcacctgaaatggtatgcagaagaggccaataatcacatcggcaaaagccaaattagcgatatacatatttgtcacggtccgcatttgcctggtcgtggccaccacccagatgaccaaagtgttgccaatgacggccacgatactgattcccccatagaaaatggacaacagggccacaatctcagcgggagccgcgtatagacgctctgtgaatgaattgaaaaatagttgtgcattagatttatatcactcggaaaaagtgcttgcaacattattataaaactaaatgagatataacaatctgttttacacaaaaatttaagaatgtatccaatacataatgcgctcctactaagttactgaaattttagttatttattacaagaccatgcttttatgagtgaataaattttgtgtgtggtgcttagcttcttccaatccattagtttcagtgttgaacttgtgaaaaatcgcgcttgctgacagaagcagattaattcaagtgtcagttgtcagtcaactgatggcaggacagacgacattcacgttcctgctgacttgtaaacgtcaaggaaattgaaccgtattttatagccaaagagggaattttataaatgccactttggacagtatatacctgtatatatatatacctatatccaatttaatataaaatattgatagttaaacccaactttgatatgaatttcattagcatatccgaacatcacctgtttcctcatatcaaagtcaatgagatggttgagcccaagtttggtctttaaattcggcaccccccacactcatgaatgattcaagatcaaagaactaacggcgaactgtcagaagaaaaaaacacttgtcaatgtttttgattgatgatacgtcaagtcaatttaatccagttggatgagtcgcgtccccagttgcttgaagggattagagagtatacttaccaaattctgcttcctcctcggctccgggcaggaattccaggcgggactcctgctcgattaagtccattgccataacactttttcgttttttagttttagttgtgtatcctaatgaggatatgatatccttcaaaccttgtattttagttcgaatgctgctgctctatgtagtgcaatacatcttcaggggcttctgagcttcattgcaatctaaactggaaagatataaattacagcatttgttcatttgttttctgaaaattcgcaaaaaagttatctgccacaagtccagtggtcagggaacaacaaaagtgcagacaacaagagaaacaaatgatctgaaaaaaaatcattgaaaagctatacaagcaatatcagtcttgccctcaaggaactgaccaaattcagtgggcggacatgagttatggctcaggtggaatcacctgtcagctttcacaagtgaaaagtttgttctgtataattgaaagtgcacccaaattcagtttggcgactgagggcactgcactagaatttcgcttgtatttcgtttcttatgaaaacagttcatgttttcatgtttttattgaagagtcatgccaacgctcaaatgttgccttagccttattgaggtggctcctaaaaaataaacaagaaagtcagcaagttcattgaatgtttgagaatagaagcctcactcaggttaattggccatttatcgaactgttaacattgttgggacttgttaatttatcttcttcagtgtaaacactgtcaagacttgttaatttattgggtaactaaatgtttattctataggcagacggaattgttatagattgacttagggatgcttgtaggaaataggctgggaaattggcgaatgtcgtgaaaaaaagatgtatttagttttgaatgactgtactatttcccccagaaagaaacaggttcacaggctttaagtttatatggaaatgcaaaaatttgtttcgagcattaaattactcattttattatgctggtcacaagctaaaagaactaaaaggagccaccctaacgcatgaccccaa

SEQ ID NO: 119 - DNA, 1623 bp, Drosophila
atggacttaatcgagcaggagtcccgcctggaattcctgcccggagccgaggaggaagcagaatttgagcgtctatacgcggctcccgctgagattgtggccctgttgtccattttctatgggggaatcagtatcgtggccgtcattggcaacactttggtcatctgggtggtggccacgaccaggcaaatgcggaccgtgacaaatatgtatatcgctaatttggcttttgccgatgtgattattggcctcttctgcataccatttcagttccaggctgccctgctgcagagttggaacctgccgtggttcatgtgcagcttctgccccttcgtccaggccctgagtgtaaatgtctcggtattcacgctgaccgccattgcaatcgatcggcatagggccatcattaatccacttagggcacgtcccaccaagttcgtatcgaagttcataattggtggaatttggatgctggccctgctatttgcggtgccctttgccattgcctttcgtgtggaggagttgaccgaaagatttcgcgagaacaatgagacctacaatgtgacgcggccattctgcatgaacaagaacctatccgatgatcaattgcaatcctttcgctacaccctggtttttgtgcagtatctggttccattctgtgtcatcagctttgtctacatccagatggcggtacgattgtggggcacacgtgctcctggtaacgcacaggattcacgggacataacgctgttgaaaaacaagaagaaggtcatcaaaatgctgattatcgtggtcattatctttggactctgctggctgccactgcagctctataatattctgtatgtcacgataccggaaatcaacgactaccacttcattagcatcgtctggttttgctgcgattggctggccatgagcaatagctgctacaatccctttatttatggcatctacaatgaaaaatttaagcgggaattcaacaagcgatttgcggcctgtttctgcaagttcaagacgagcatggacgcccacgaaaggaccttttcgatgcacacccgcgccagctccataaggtcaacctacgccaactcctcgatgcgaatccggagtaatctctttggtccggcgcgtggtggtgtcaacaatgggaagccgggcttgcatatgccgcgggtgcatggatccggtgctaacagcggcatttacaacggaagtagtgggcagaacaacaatgtcaatggccaacatcatcagcatcaaagcgtggttacctttgcggccactccgggtgtttcggcaccaggtgttggcgttgcaatgccgccgtggcggcgaaacaacttcaaacctctgcatccgaacgtaatcgaatgcgaggacgacgtggcactcatggagctgccatcaaccacgccccccagcgaggagttggcatccggggccggagtccagttggccctgctaagcagggagagctccagctgcatttgcgaacaggaatttggcagccaaaccgaatgcgatggcacctgcatactcagcgaggtgtcgcgagtccacctgcccggctcgcaggcgaaggacaaggatgcgggcaagtccttgtggcaaccactttaa

SEQ ID NO: 120 - protein, 540 aa, Drosophila
MDLIEQESRLEFLPGAEEEAEFERLYAAPAEIVALLSIFYGGISIVAVIGNTLVIWVVATTRQMRTVTNMYIANLAFADVIIGLFCIPFQFQAALLQSWNLPWFMCSFCPFVQALSVNVSVFTLTAIAIDRHRAIINPLRARPTKFVSKFIIGGIWMLALLFAVPFAIAFRVEELTERFRENNETYNVTRPFCMNKNLSDDQLQSFRYTLVFVQYLVPFCVISFVYIQMAVRLWGTRAPGNAQDSRDITLLKNKKKVIKMLIIVVIIFGLCWLPLQLYNILYVTIPEINDYHFISIVWFCCDWLAMSNSCYNPFIYGIYNEKFKREFNKRFAACFCKFKTSMDAHERTFSMHTRASSIRSTYANSSMRIRSNLFGPARGGVNNGKPGLHMPRVHGSGANSGIYNGSSGQNNNVNGQHHQHQSVVTFAATPGVSAPGVGVAMPPWRRNNFKPLHPNVIECEDDVALMELPSTTPPSEELASGAGVQLALLSRESSSCICEQEFGSQTECDGTCILSEVSRVHLPGSQAKDKDAGKSLWQPL

SEQ ID NO: 121 - DNA, 4391 bp, Drosophila
agtggaaatttcgaaattgaaatggaccctttccgccgaaaaatcgattgattttcaatttcccctctgcgctttcttgttttgctaagtttgaaagttatttgctttaactcatgctgaaagaaaatatcagttgactagccgctttttaaccttttattcgaattttatccttagttgttgcacaaaagagtctatgtgcttagttgatgatatcagtcgatatctctttaattggccaataactgctgaatatgtggcagcacaatatagttacgaaagtaatcggcttaagagcccacactgcgatgtgcattttagtgcattaaaaggacttgcaatgcactactgtctaatccagattacgacgacagccaatggctttaagcgcaagtattttaaaactgaattgtgagccgtgattccagctggagttaaataggaaaactgttgggcttaaagcagctgtagtggcaaataccaatcgagcatggcttcaaatcacgttcatttcgttccacatgacatgacatcatggcaatggtatcaaagtgcacacttgtagacacagaagcctcgggtttgcttaaatttttatggcctcaacacttaccaggtgcacagcttttcttgccagctactggatgttcagtagcagggaaatcgacagctggaagctcgagtatcaagaaaattgagaatgaatggaaaatgggttaccactctctttgttgcagacaaatttctccttttaattgaaggcaaaaagggatatatatttttaaatagttggcttctgacagagacttacatgcgaaaataaaaaatttagtattaattaaatcgactcgctgggaagtattgtcttattttatattagaatttttaaattttaatttagggacctatacataatggcaatcaattagcataaaatataacgttattaatacattggtcctggacctttgttcgtcggggaatacgtattttagtatatctactgatgtgatctgctgttgtagttggtggatgaggtggtcatcgactggagctcagtggtgcgcttttggacatccagctccatcttggtggggcaaatcagacccacccacagccgacggttcgtggagtccaagaggacaaagtaaatgaacatcacaaatccctgcatagtggccgtgatgcagaagaggtatgaaaaagccacacctgcctgcatgaaggcgaatattccaaagatccaggtaagacccagcaaaaagaagagcattatggagagtcggatctgcttaaccaccattttcttttcgtttttatggatgctctggctcaaagagtgcgagatgctgtagaaaacatacacgaatatcaccaagttgcacacagtaatcaaggtcacagggagcaccaccccaaaaatgagaccatagcccgatggatagcagatgccagtgtccgtggaaagttgggcagccgaggggacgtacgaatcgggatctataagggccaccagcagggtggggaccaagggcagtagccaggccacaatggcggccttcaggatatagcgaggtggtctctcgattccgataactgtgacgtaacgctggaactgcaggaaggcgatgattagcatccaactgaagagaaccagaatggagtactgcatggcagcgcccagagccacacagcgaactgtgtttccattcacaacaagcgcttcggatacatcatctgtattgagaaacacgaagagcatcatctggagacacatagccaggcaaaggtgcagtaagaccttcgtggaggcctgactgcgccagcttttgaagagtgcggcagtgaggaatattcccagtatacccaaaagggaaagactgcagcccactatcgagataatgtccagcactttctcattaatcggagtaattagaatctcctcgccaaggtcgttggctcgatagcttccacccaccaggaatgcaaactgtgtgaggtggttagtgtggcactcgatgatggcatccttcaagaggtccgaactgctttcagtgcttactccctcagttgaccaggtttcatagttccaatatccgcatccactcccaatgctaaaggcctttgaatccggattgcgaagattttcattacgcagaagaaagggcagtggcagagagagataattgcctatttaatggaagggtattcaaattagttcgagtattcgaaaacaaattttcatgcgtttcttacttctcagtcctggtattgaaatggagattactttgctgcgcggcttacgagtgcgttgcaatgaggtttccacgaacagagcatcgtgggcatagactttaaagatgagataggttgctcccctgcttttcacttgccgccagagattctccggcaaaaatgcagctgtctccagattagattcctccttgaccttagccaagtcttcggagaatcgaatgaagcggtaccagaagccactggcggaagtctttcgttgatcccctggcgcagagaatatagctaatccagttatgcgatcgcattcggggttggcgaagaacacgctgatattgccggtaatcagagcttggacaccgatatctgagaagttgtacgtttccactccagtagtggccgtttctgcttcatcactggtcggcttggccaccaccttgccgcatctgtccttgggaaccagttgctccggaagagcatccatgtagctttcgaactggctgagcagggaattggtagcgttgagctgagctgataatctaagaaccttactgtcgcaggacattatctccttgcagacactgaccaagtccacactgaccgtggcatccttgtcctgctgcatcagggcgccgaacatttgtccggtcatgtgaacatcggcgggtagaagattcccacctctctgtcggaacatgttcctcattatgccagtcatctcacgacgcccctgggtgtcattggtgcgcctcctgccctcgagaacgtcgtcatgcaggctattcaagtcaccgctgatcgtgtgctccctgaatcgcctcaaacacaccacgggatcccagtgttcggtggactcccagttggctcggttgtccttcactctgcactccctggtgaccggcattccgtttcgcagaaggcaaacatcgtgcagggtggcacgttcgccgattctagcccgtttccacttgttctggtgaggtgtttgatcgtggttacgcgttatgtagtcgtgctgaaactcctccggctcgcagaacatggacgtacagtaaaccagatgtgtttgcataagttcgtccgatgaattacgttcctctccatcacagtactgaaacgttccgtttctcaagcacatttgattttcctttgggcaggcggaataaatcggcgaaaccaaggccaagaccacaaagagcccagcacaccagttgaaattcatggcgatgaatcaggtgccacagctgtttgcagctctccgaaaatgtttacaaattctttggcagatagtacttttcacgtccgacgttcttgaaatatcgcggcacactgagctgtctgtcgatcgattagatttctgtagaccccttcttcatggtgtttgctatcagttgccaccacgagcgctaatcgacccccgttttttgtatatctacacactactcacaaaaagacctcaagtctgcggcatttgatacaatttacattgtgattaacacgaccacggcaattgaaggcgaatccgacggaaccctttgaggcagggaagtaacaccaaacttgtgacgtcgtctttatttgtgcaaatagcgatttcacgcctttttaccggtcttggtacttaaaatgctctggctgattcattttttacgcgcttgaattgccagataagaagttcttaccaggaaacacggctgtacatgggctatttatacatcaatgatacaaaaataatgttaaaaaaaatttaaaaactttaaaaactagttttatttgcatccgttcaagaaagagattttttttagatttgtttgatcaattcattgctatggcttctaataaatgtgaaatgtgaaacaccttcacataaaaaagtatttacgcaattcactcaagcaaaacagatcctttgtccttgaaaaaagttatgaaatgcaaagcacttcaccttggttgcataaagtgcgattttcattttgacaggctacgcgttttcaaagactcagccttcgattataatccacctgtactcacttcattgtaagccagtttttgggccaaaaagtaatttttacagccgacttcgcagcacgtagactgcgtgtgctagcggaaattgttagcttgttgacacgttt

SEQ ID NO: 122 - DNA, 2325 bp, Drosophila
atgtgcttgagaaacggaacgtttcagtactgtgatggagaggaacgtaattcatcggacgaacttatgcaaacacatctggtttactgtacgtccatgttctgcgagccggaggagtttcagcacgactacataacgcgtaaccacgatcaaacacctcaccagaacaagtggaaacgggctagaatcggcgaacgtgccaccctgcacgatgtttgccttctgcgaaacggaatgccggtcaccagggagtgcagagtgaaggacaaccgagccaactgggagtccaccgaacactgggatcccgtggtgtgtttgaggcgattcagggagcacacgatcagcggtgacttgaatagcctgcatgacgacgttctcgagggcaggaggcgcaccaatgacacccaggggcgtcgtgagatgactggcataatgaggaacatgttccgacagagaggtgggaatcttctacccgccgatgttcacatgaccggacaaatgttcggcgccctgatgcagcaggacaaggatgccacggtcagtgtggacttggtcagtgtctgcaaggagataatgtcctgcgacagtaaggttcttagattatcagctcagctcaacgctaccaattccctgctcagccagttcgaaagctacatggatgctcttccggagcaactggttcccaaggacagatgcggcaaggtggtggccaagccgaccagtgatgaagcagaaacggccactactggagtggaaacgtacaacttctcagatatcggtgtccaagctctgattaccggcaatatcagcgtgttcttcgccaaccccgaatgcgatcgcataactggattagctatattctctgcgccaggggatcaacgaaagacttccgccagtggcttctggtaccgcttcattcgattctccgaagacttggctaaggtcaaggaggaatctaatctggagacagctgcatttttgccggagaatctctggcggcaagtgaaaagcaggggagcaacctatctcatctttaaagtctatgcccacgatgctctgttcgtggaaacctcattgcaacgcactcgtaagccgcgcagcaaagtaatctccatttcaataccaggactgagaagcaattatctctctctgccactgccctttcttctgcgtaatgaaaatcttcgcaatccggattcaaaggcctttagcattgggagtggatgcggatattggaactatgaaacctggtcaactgagggagtaagcactgaaagcagttcggacctcttgaaggatgccatcatcgagtgccacactaaccacctcacacagtttgcattcctggtgggtggaagctatcgagccaacgaccttggcgaggagattctaattactccgattaatgagaaagtgctggacattatctcgatagtgggctgcagtctttcccttttgggtatactgggaatattcctcactgccgcactcttcaaaagctggcgcagtcaggcctccacgaaggtcttactgcacctttgcctggctatgtgtctccagatgatgctcttcgtgtttctcaatacagatgatgtatccgaagcgcttgttgtgaatggaaacacagttcgctgtgtggctctgggcgctgccatgcagtactccattctggttctcttcagttggatgctaatcatcgccttcctgcagttccagcgttacgtcacagttatcggaatcgagagaccacctcgctatatcctgaaggccgccattgtggcctggctactgcccttggtccccaccctgctggtggcccttatagatcccgattcgtacgtcccctcggctgcccaactttccacggacactggcatctgctatccatcgggctatggtctcatttttggggtggtgctccctgtgaccttgattactgtgtgcaacttggtgatattcgtgtatgttttctacagcatctcgcactctttgagccagagcatccataaaaacgaaaagaaaatggtggttaagcagatccgactctccataatgctcttctttttgctgggtcttacctggatctttggaatattcgccttcatgcaggcaggtgtggctttttcatacctcttctgcatcacggccactatgcagggatttgtgatgttcatttactttgtcctcttggactccacgaaccgtcggctgtgggtgggtctgatttgccccaccaagatggagctggatgtccaaaagcgcaccactgagctccagtcgatgaccacctcatccaccaactacaacagcagatcacatcagtag

SEQ ID NO: 123 - protein, 774 aa, Drosophila
MCLRNGTFQYCDGEERNSSDELMQTHLVYCTSMFCEPEEFQHDYITRNHDQTPHQNKWKRARIGERATLHDVCLLRNGMPVTRECRVKDNRANWESTEHWDPVVCLRRFREHTISGDLNSLHDDVLEGRRRTNDTQGRREMTGIMRNMFRQRGGNLLPADVHMTGQMFGALMQQDKDATVSVDLVSVCKEIMSCDSKVLRLSAQLNATNSLLSQFESYMDALPEQLVPKDRCGKVVAKPTSDEAETATTGVETYNFSDIGVQALITGNISVFFANPECDRITGLAIFSAPGDQRKTSASGFWYRFIRFSEDLAKVKEESNLETAAFLPENLWRQVKSRGATYLIFKVYAHDALFVETSLQRTRKPRSKVISISIPGLRSNYLSLPLPFLLRNENLRNPDSKAFSIGSGCGYWNYETWSTEGVSTESSSDLLKDAIIECHTNHLTQFAFLVGGSYRANDLGEEILITPINEKVLDIISIVGCSLSLLGILGIFLTAALFKSWRSQASTKVLLHLCLAMCLQMMLFVFLNTDDVSEALVVNGNTVRCVALGAAMQYSILVLFSWMLIIAFLQFQRYVTVIGIERPPRYILKAAIVAWLLPLVPTLLVALIDPDSYVPSAAQLSTDTGICYPSGYGLIFGVVLPVTLITVCNLVIFVYVFYSISHSLSQSIHKNEKKMVVKQIRLSIMLFFLLGLTWIFGIFAFMQAGVAFSYLFCITATMQGFVMFIYFVLLDSTNRRLWVGLICPTKMELDVQKRTTELQSMTTSSTNYNSRSHQ

SEQ ID NO: 124 - DNA, 7986 bp, Drosophila
gtgttaatccccttggcttatcggtttaatctatttataaaatcaattcaaacataaagcggcgcatatctcagcgatgttgggtaggtaaccaaaagtaaatacactctaattcctattgatcttgtataaatacgagtggatagttagttagatatcaccattttgcaccgtgcataaacataaagtgagatactcgttttcgagagatgcacttctgagtacccgtattcaaatcgtactctcagtagccaagtactcagtactcaagctgtttgtcttacgggtgtggacgtgcgagcagacactttaggagtgggatagccggagcagaccggctgaagtgtcatccgatcgaaggtcgcctcaacagcacagcgatttcgattccgattccaaatccgattctttggccataggaattcctctgggaggtggagcatgtggctgatttatttatttcgagcgatataaacagagcaatacgagaatgggcgaatataagtttgctcgaacggctggtccgttccgagctgaaattgaattgtaaatggccatattaattgggaatcatttaaaatttccaatgattttttctgtgttttggtgtcggcagtctatgcatgttcggtggcataatttatgggcgctaattactatcgccccattttgtgtatttcgcgtgctgtccaaggccaattacgcttacttattgcaatttatgtggccacagtccggccgtaattggaaattgtgtaaggtcgcaggcaatttcattatttgtatgcacttctggacgctccggttgccgggtctagcatttttctagcatttttctaatgacgccagcgcgtttggggacgacgttacctagcccagttttccctttgcagccatttgattaagtgacctacgtttcgcccacacagaatcatcaatttgttcatgtcgccgacggtgcgaataaggtccaacctaagtgagtgagctatccgccggcatggcggcgttggaacatccggatgccatgctgccatactccaaattgttgtcaacagccctcactgtggccagtggtaactcgaactcctccgatggtactttgctgctcatccagaccagtgcggcaccaggtggcgatgtgatggccaccggagccggagccggaaagttgggtgtgccctcgatgaactcgtacctggtgagcatggcgtggcccaagtcgctggcagtggccgtcttcctggtcatcatcctggtcaccgtggtgggcaacacactcgtcatcctcgccgttctgaccacacgccgcctgcgcaccgtaaccaactgtttcgtgatgaacttggccatcaccgactggctggtcggcacctgcgtgatgcctccatcggtggtgctctacataacaggtgagaatggcagcggagggcctgtccatgcccatcgatggccaaagatttatggctctgtgggggctttacacttccggggaaggtggaatcggggcaagtgtttactattcgaagccctccggtggaagttcgggtagtaaacatttgcccaaatcgatgggggagcacatttggtcgatttcgatttaaaataatcccacagcgaaaattataaaatttctccgttggcaaaatatacatatttttgattgcaaaatatcttgtgagtggtgtgcgagtgttttatgggtttcgctggaaaacctttgataattttttctggaatctatatttttagcagaattttgaataaagcataacaacattagtggttaaaaattttgtataatttagtaattttaaataaattatgtatctttaataattaacatctcttatttaacgcatttcataaatgtataaaaagcaatcaaacatgtgatcttttcgaagccaaatgaatatacaaagtttaatattccttgtcataacttgaacaatacaaagaagaatttatagtggtttaaattgaaggatctgccagtgtaatgcctccttaatcccggccaggtgcacaaaccgattgaagcacggcgacaaatatttgttctttgcaggcacttggcgctttggctggatactgtgcgacatttggatctcgctggacatcctgctctgcagcggctccatcctcagcctgtgcgccatcagtctggacaggtgagttggccaactaatttcgtaatttgccgttgatgtcatagcaatgaccacagtccatagcccgttgtccacggtcctcggtccttagataaagtcatggcaaggtgcaaaaacagtgcaaataatttatttgttgacgtttttattgccgcatgaccgttgtcctggccattcccagtgcatatcctttgagtgtgcgacgccacaatggcaaggattgggttgggcttggattcccattcacccattccctatttccccatttcctccatttagccatcccaccgtttgcttttgttggaagtttcaattacattttaatggcatttccaagttttgtgttgtggctcccgagttgagctgatccagctgagccatggagccatggacctgaacctcaaccaggacaaacaccgacgcccactggcgttgtgtgtgccttttggcctggccagaaagccgtctgcggctttgcgaacaatatgtccgcttggcttttgtttttttccagcatttctctggccatttccgttgcgtttattggcccggcttttataatttcctctttttcaccttcgtttttgttttatatttcgcaggtatctcgccgtcacacaaccactgacgtactccaagaagcgccgatccaagcgactggccctcctcatgattctcgtcgtgtggataactgccctgtcaatcacatgtccaccctatttgggctggtaagttagcgccagctgcacggagaacaaaatcaaccttaacccatgatggatcgcctattcatctgttaagaaaaccattcatgttataatcatttaattgaacgcattaaattgggttgggagtacaggcaacatgtgataatgatcagtatccaaaggaagaaaaataatatatttaatatcatataatattattaataatattatattataaatatggccaagataaatttatttgtagtgctctattaagtttatagatatatatttttttgaattttgtaatattattttcactctttcccgtgtaattcgaaatattatatgtaatatttttattgagcacccattttttttttaccaaatttgtccttccggaggcgtgacaatactttgtggctttttgtggctgaaagtcctgctcgcttttttttttcttttttgagctaatggctgtgcggtggcgcagcatagataatgtgctacaaaagggtctcgaaatacacacgtttatttatattatatttgcgcctttggctgcgcctaaaaaacattacgtaattgacgacgggttgttgctgttgctgctggtcgtgcagccattacattgaagttttaatgagttgttaatgactttgtttgccgcggcgcatttgctttgttctcacctacgcacacacactcagcgcgaaagccgcacacttgtgtgttgcatacttccaggcgcccaaattaaccagcactcactcacacacactcgcactcactcacacacaccacaaagccagcatgtccttaatgccattggccatggcttagttttggccccctttggctgaaagcgaagagcatggcttaaagggcacattaaaacggtctgaggccgaattacagccacagctgcaggacattggaaaatttggaaaatttggcgctgggggaaaatcgcaattataagcgccagcagatggcgccacttacatattttcattctttaagcggactagttttatgaaaaaagtttgcaaatgcagcggttgcaacaactgtttgttttactcacaatctgttatttgttattgcctaatgaatactaaactgattgtgtttgcttgctatttaaatttagatttaacttttggctaattgatttaagcattgtttatttagttcattttttaatttaactaatgcatagctaatgtattaaattgccctcaatttcggattgaataattaatgttaaacaagaagtttagtaggaaaatcggctatttccattcgggtcttgtaaataccaaccttaacaaagttgcatttgtacaattatactgtcaggttattttggtatcgggtagcagtaattaccgtgagtttttggataacacatacttggggtaacaagcagctagtttagttgaattacaacaccggaaaattccattgacagtagtgacaatgaggcaataaactttttgaaagagaaacattataggaaactgtgtatccagtgggcgtgccccaaactttggttggcatatttgtaaaaattggccatccaaaaaataaatcaaaacaactggcaatcattttataatcgtgtgggcgtgagtcttttaggcgattggggggctttagagtgggcgtggtaatgttctgaaataagcttgttcccgagatttggactccgggggacaaatggacataaccgaatcaaggatatatatacttcatgcttctgtctgctacatgatattcagtgaacctagtattctaagaatagtgggtacaataacccagtatgaactggaagaagctgaatcttgccacctacagtggatgtatgtgacaatttgcccattttttttactcaattccccacagcacacgggtgtacctttagttgacacatttggtgtacgccaccacattactctgttgtctcggaatcgttttcttccgcatattgatttaaagtcagctccgatttgtactgcctgaatgaccaacacactgcgatgtgcataagtaaaaggcttacaggtgggactactctgactggcttaggtttaggatttgaattcgaatttcgcccggcttaactcagccagttgtcattccccaagtcccagttccccagccgcaatcacaaccgcaagagccaccaaaccagagcaggtaccaggtacctcccacatccaccacatctcacatccttccaacccgcaaaccgcatgcaattcgaactggaattcaatttgccattcacatccacattcgcaggtacgaggtcggtcggcaccaggcggagttcgtggactgccgctacaaccaaaacaagggctacgtggtcttctcggcgatgggatcgttcttcattcccctcaccgtgatgctctacgtttacgtgaagattggttatgtcctcacgtcacggcgacagcgcattgtgcgcgatgcggtaagctacatctccagctccatcactatataagcatatatgtatgtgtccaccactttggtgtcccctgaaatgtgtccggaaatttatcatgtcacacctaacacatctaaccagctaaccaggggactaagttgtcaggcactggggaaaaagatccaggagtgcgctcaacacttcaagtgcagatcttcattaagttgggatacccactgggtatcccacttgagtaccagccacttatcgcacagtactgcaggtgatattttaagtgctgagctttgataacagaagtccaactaatatatctaatcacaaattaaatttgctgtgaattcttggatgtaaactgaatgaattatcttttgtttgttagcatgaaaaatgaacttcagtgtcaataaatgaaatgaaaatgcaataagaacactttttgaatatttaaaaagagtgcatagtagttgataaatatattcttttagtttagtactaattgaacgtttgctgccaagagcaagtgaagtaaattgtagaaagtaggtgacgtgaaatggaacgaagtaattacagcaatccaaatcccgaatctctatgccctgacatgcaatctaaattattcctcacgtttttgtcagtgctctgcttacatattcctcttctattatgtccttccaacagtactcggagcgcacggcagactacgatgtggatggggacaacttcatctcggagtcggagcactatcattgcacgccaaccaagtggctgccgaacaggaagtcccgctggaggttcaactccctgcacgacccaccacccagcgccgccacgaatgcagcagcgaagggacaccagtcgtccgtcaagtgctccaagtgctccaagtgctcctctgccactggaactgctggagctggagctggagctggtgtggtagacaaaacgctgacgttcaaacatcagcccaccttttacgagctggtcgaggtgtcgcgtctctcgtcgctcattcactgctcggcaattagctgcaagtatggaggaccctgcatgcactccacgccctcgggcatgcactacgttggcacggaggcctccttctcggacacctgcctgggtggcaatgtgagcaacaacaccaccaccaccaccaccaacaccgtcgcactggaaaccaacgagaaactggaggcggaggccaagcaaaagcaacagcagcaacgatcctccttcgaccaccatcacccgcatgcacaccatcatggctcccatggccagcagagccatcacaatcatcaccatcgcatgccgatgcgagtttcgaccacgaaacgtgatagcaagaccgccaagaccctgactattgtgatgggcggcctaattgcttgctggctgcccttcttcgtctattatctgctgatacccttcctgccgcgacccgccgtcctcgaggacctcatgttcggcttcacctggattggctgggtcaactgcgccatcaacccgttcatctacgccttctacaatccggactttcgcactgccttctggcggctcacctgtcgccccatttgcaagcagaagcgtccgcccaaccacctggccatgttccgtggctagtttccggatgcagatgcagttgcggatgcggatgcggatccggaaccggtttccgaatcactgagcacttgagtgtgtgtcatagtgccgccatctccagtcgcacaatcgacgctcacttgggtggtgggggaaatatctcaggcatatccttaacttttcgccgtgctggttcaccaacttctatgtaattagcataaaaaataagtggagaaactaccaactcgcatttcgatctttttgaagtacaagttatgccaatgcaaggacatcaaattgactctagactacagtacagatagtaaataaaaaagaatttaaggagtattaactacaatagataagctgtttgagaaatgcactatctcttatattaaatcaattgaagataatgaaaatcaaatattagcttaacaaaactgctgaatttaattcaagtttatttcatgaaaacaaatatatagaaactagtttaaaatttatcacacatgtccctccaaaaattgtaactaatattttggcaaacgaagccaatggagggaccttttggccaactcgtcgccactagctcaccaactaagtattcatttgccaggcactataagctgtttgccgcactctatctgcatcgtttatgccaaacgcagctagtaaaactaagatacttatggtcaatattgattggagcaaagattgccttgttaaacccaaaaaatcgactgccttttgaagcttcaaaagccgcatttcgagcagcatcttaaaggtcactttacggtcgcaattttttttttttaagactcactggacttggccggaagttgagattcttgcctagaccagatccaaatcctatatatagtattttcctgtgtgtgagcgttgattgtgcgaggcgagcggcacgaagcgaaacgtaacgaaacaaaagacaaattatagtatttgcgagtctttgttgcctgacggcaactgttggccatcgggatgagtgggatga

SEQ ID NO: 125 - DNA, 1704 bp, Drosophila
atggcggcgttggaacatccggatgccatgctgccatactccaaattgttgtcaacagccctcactgtggccagtggtaactcgaactcctccgatggtactttgctgctcatccagaccagtgcggcaccaggtggcgatgtgatggccaccggagccggagccggaaagttgggtgtgccctcgatgaactcgtacctggtgagcatggcgtggcccaagtcgctggcagtggccgtcttcctggtcatcatcctggtcaccgtggtgggcaacacactcgtcatcctcgccgttctgaccacacgccgcctgcgcaccgtaaccaactgtttcgtgatgaacttggccatcaccgactggctggtcggcacctgcgtgatgcctccatcggtggtgctctacataacaggcacttggcgctttggctggatactgtgcgacatttggatctcgctggacatcctgctctgcagcggctccatcctcagcctgtgcgccatcagtctggacaggtatctcgccgtcacacaaccactgacgtactccaagaagcgccgatccaagcgactggccctcctcatgattctcgtcgtgtggataactgccctgtcaatcacatgtccaccctatttgggctggtacgaggtcggtcggcaccaggcggagttcgtggactgccgctacaaccaaaacaagggctacgtggtcttctcggcgatgggatcgttcttcattcccctcaccgtgatgctctacgtttacgtgaagattggttatgtcctcacgtcacggcgacagcgcattgtgcgcgatgcgtactcggagcgcacggcagactacgatgtggatggggacaacttcatctcggagtcggagcactatcattgcacgccaaccaagtggctgccgaacaggaagtcccgctggaggttcaactccctgcacgacccaccacccagcgccgccacgaatgcagcagcgaagggacaccagtcgtccgtcaagtgctccaagtgctccaagtgctcctctgccactggaactgctggagctggagctggagctggtgtggtagacaaaacgctgacgttcaaacatcagcccaccttttacgagctggtcgaggtgtcgcgtctctcgtcgctcattcactgctcggcaattagctgcaagtatggaggaccctgcatgcactccacgccctcgggcatgcactacgttggcacggaggcctccttctcggacacctgcctgggtggcaataaactggaggcggaggccaagcaaaagcaacagcagcaacgatcctccttcgaccaccatcacccgcatgcacaccatcatggctcccatggccagcagagccatcacaatcatcaccatcgcatgccgatgcgagtttcgaccacgaaacgtgatagcaagaccgccaagaccctgactattgtgatgggcggcctaattgcttgctggctgcccttcttcgtctattatctgctgatacccttcctgccgcgacccgccgtcctcgaggacctcatgttcggcttcacctggattggctgggtcaactgcgccatcaacccgttcatctacgccttctacaatccggactttcgcactgccttctggcggctcacctgtcgccccatttgcaagcagaagcgtccgcccaaccacctggccatgttccgtggctag

SEQ ID NO: 126 - protein, 567 aa, Drosophila
MAALEHPDAMLPYSKLLSTALTVASGNSNSSDGTLLLIQTSAAPGGDVMATGAGAGKLGVPSMNSYLVSMAWPKSLAVAVFLVIILVTVVGNTLVILAVLTTRRLRTVTNCFVMNLAITDWLVGTCVMPPSVVLYITGTWRFGWILCDIWISLDILLCSGSILSLCAISLDRYLAVTQPLTYSKKRRSKRLALLMILVVWITALSITCPPYLGWYEVGRHQAEFVDCRYNQNKGYVVFSAMGSFFIPLTVMLYVYVKIGYVLTSRRQRIVRDAYSERTADYDVDGDNFISESEHYHCTPTKWLPNRKSRWRFNSLHDPPPSAATNAAAKGHQSSVKCSKCSKCSSATGTAGAGAGAGVVDKTLTFKHQPTFYELVEVSRLSSLIHCSAISCKYGGPCMHSTPSGMHYVGTEASFSDTCLGGNKLEAEAKQKQQQQRSSFDHHHPHAHHHGSHGQQSHHNHHHRMPMRVSTTKRDSKTAKTLTIVMGGLIACWLPFFVYYLLIPFLPRPAVLEDLMFGFTWIGWVNCAINPFIYAFYNPDFRTAFWRLTCRPICKQKRPPNHLAMFRG

SEQ ID NO: 127 - DNA, 3681 bp, Drosophila
tccatgcatttataattcaacattcgctcgcggccttatgaaaagctcatttggttacgagtgtcctgggtccttaagtcctttctacctcgaaagtgttaatgagccggcaggctgccgtaattatgcaaatttttaatgactatgaaaatggtttccgcggagcaacaagtgctcgcgtcttggtccttggatctctatacccctcatacccctctaaaaatgccagctaattccatttgaccccagaggccccaaagcaatccatttgcatggctaccaatagctcgtcgcattcgtcgtaccaacccaaccattttccatttaatccctacgatgtgagagctctgtactgagcttactgctggcattcggtctttagatttatacagattttgtcaaacaaaacatgaattcgcacttttacacacatatgtgtgtctgtaaatgactgaaagggagagcgtcgaaagccgatttggtgccattcagttgaagccctttaggtcgtgattcgcatatggtcgaggccatttaagctgatatcaggcacattaaatgtagtaaaggaacgtaagtatgataaaggcagcatcacaaaagtgtcaagtaaatgcaaattaacattaatttaagacttgaattcgtctgtactgaaacagtacaattaaaatataattagctatatatttgtaacttttaagaacggatacttctgggaccaatgttttttgaacataacagatatctaccatatgaagtgaaataaatagaatttttcgggaccattttgtttccagatttcaaatgaaatgaaacgcatatttttgccagtttttgataataaatatcaggggacttggccaaattttaatacaatctcatttagaaaaataaaacaattgcatgccgataaaataataagtgataccgaaagagagcttttgattagagtgaaatatgctcatgcggttcagtcgagatccaaagtttgcgcagaatgcttctgaatattttagctataattcttgtattcgtaatttcaagccaatcggaggcagttattcctggatgtgattacttcgacaccgtggatatatctcatatcccaaagctaaatgactcctatgcgtacgaggagctaatcattcctgctcatctcacgggtctatatacatttaggcaactggcggatggatcacaggagccagtgaagagtcacttaagagcatgtatctgcaaactaaaaccttgtatccgattctgctgcccccgcaacaaaatgatgccgaatagtcgctgtagcgatggactcacagagaatctgaagcggatcaatccctacttgaagatcacactggaggatggaactataggaaaatattaccttctcaccgacatgatcgtcttaagatatgagtttcggtattgcgagaaggttgtttcggtacaggaggatcagtacaagctatatgaggttaagatttcaatctttttgaagtatctcagtataatttgatatctatagaatggcagctttatgattaaacccgatgtaaactggacattgagcaagcagtggtactgcctccatccccgtttggaagatccgaattccatatggatactggaacatgtatatataccgaagtcaatgccagccgtacctcagggcaagcacctactatatcatctaatctcatctcatctaattctctgatttttccagtcggtactatttccatggttggttgtattctcacgattgcagtgtatctctacataaagaaactgcgaaatttgcttggaaaatgtttcatttgctatgtattttgtaagtttgtgcagtaccttatctgggcaggaggagatttgaacttgtggaataatatttgctccctagcaggttagttgaatccatattaaagtttgacttaaaatatgcgtttattctaaacaggttacactaactatttctttgctttggcttctcacttttggctctctgttatgagtcatcaaatatggaaaaacttgaggttaatcaatcgggatgaacgtagctatcactttctcatctacaacatctacggttggggcacacctgctatcatgacggcaattacatatctggtggattgggcctgggaggatagacctgacaaactgaattggattcccggtgttggcttatatcgatgctggataaacagtgggttttagggtagagtgtttaagccagtttaagaccagtaattgattttctttgaacagcctatgactggtctgctatgatatacctatatggaccgatgctgatcttgagtttattcaatgtggtcacgtttatcctgacagtaaatcacataatgaagattaagagtagcgttaagagttctacccaacagcagcgaaagtgtatacagaataatgagtaagctttaagtatttataacttactatttctaattccattctcttactatagttttctattatacctacgactgtcggtgatgatgggcgtgactgggatttctgaggtaataacttacttcgtcaagcggcacaaattttggcgacaagtccttcgggtgccaaattttttccatttgggttccggtatagtcgtatttgtgctatttattcttaagcgcagcacatttcaaatgataatggagaggtaagagctttttgcttaatagattttaaagttactatatcaatatcattttagaatcagcggtccgaggagacaacaacctgcatcttgatcaacctactagtttaaataaatgcaaattatagataagtgagctctttttttttataagtttagtatagagcagtccctctatggtcaataaatgcttataatcttcttattattgaaaaattctttattattgatatttaatcaataatatatttttattttttttttttttgttagaacaaaatgtcaattgtcatcaaaaatatgtgtttgtgaataaaatcaagttccgtaggaaaatatgcacttttatggaaactcgctttttcaattagtccttgcatacgcgccaggaccccaaatccttccaccttccccacaatcctcggctggtgtcagaatgcaaatgcagatttttaagccttgcggcagcttttgcgcaaacagattgtaaacaaataaatgccgccggcagacacacagatactcgaacattcggtggtcagtggccagattgcagcctgaaattcattcaatactttatctcacatgcattgcacttcacttttgagccacgttaagttcagtctgccgaaacctttttcgcacttaagtggttaaattggctgtgataaattgttgccgagtcaaagttgctgccgctgcggggcacctcaagtcacatgtggtgatggtgcgagtgggtggttgggtggcgtgtgcttttctcctcggaaaatgcgtgaaaagtccacaagcacaaaaagtctgggaggctggctctctctcatctcatcacgttcattgagtgcctgtcgctgacagtaatcataacgcagtcatcagctcgtaatattacggccgcctgacatatgacatctgggaaagcggaaaatgggggctcagggaccaaggaaaaggtatgcgtactattaatatgccagtgtgtgaaggagctttcattc

SEQ ID NO: 128 - DNA, 1503 bp, Drosophila
atgcttctgaatattttagctataattcttgtattcgtaatttcaagccaatcggaggcagttattcctggatgtgattacttcgacaccgtggatatatctcatatcccaaagctaaatgactcctatgcgtacgaggagctaatcattcctgctcatctcacgggtctatatacatttaggcaactggcggatggatcacaggagccagtgaagagtcacttaagagcatgtatctgcaaactaaaaccttgtatccgattctgctgcccccgcaacaaaatgatgccgaatagtcgctgtagcgatggactcacagagaatctgaagcggatcaatccctacttgaagatcacactggaggatggaactataggaaaatattaccttctcaccgacatgatcgtcttaagatatgagtttcggtattgcgagaaggttgtttcggtacaggaggatcagtacaagctatatgaggttaagatttcaatctttttgaagtatctcagtataatttgatatctatagaatggcagctttatgattaaacccgatgtaaactggacattgagcaagcagtggtactgcctccatccccgtttggaagatccgaattccatatggatactggaacattccatggttggttgtattctcacgattgcagtgtatctctacataaagaaactgcgaaatttgcttggaaaatgtttcatttgctatgtattttgtaagtttgtgcagtaccttatctgggcaggaggagatttgaacttgtggaataatatttgctccctagcaggttagttgaatccatattaaagtttgacttaaaatatgcgtttattctaaacaggttacactaactatttctttgctttggcttctcacttttggctctctgttatgagtcatcaaatatggaaaaacttgaggttaatcaatcgggatgaacgtagctatcactttctcatctacaacatctacggttggggcacacctgctatcatgacggcaattacatatctggtggattgggcctgggaggatagacctgacaaactgaattggattcccggtgttggcttatatcgatgctggatatggtctgctatgatatacctatatggaccgatgctgatcttgagtttattcaatgtggtcacgtttatcctgacagtaaatcacataatgaagattaagagtagcgttaagagttctacccaacagcagcgaaagtgtatacagaataatgagtaagctttaagtatttataacttactatttctaattccattctcttactatagttttctattatacctacgactgtcggtgatgatgggcgtgactgggatttctgaggtaataacttacttcgtcaagcggcacaaattttggcgacaagtccttcgggtgccaaattttttccatttgggttccggtatagtcgtatttgtgctatttattcttaagcgcagcacatttcaaatgataatggag

SEQ ID NO: 129 - protein, 172 aa, Drosophila
MLLNILAIILVFVISSQSEAVIPGCDYFDTVDISHIPKLNDSYAYEELIIPAHLTGLYTFRQLADGSQEPVKSHLRACICKLKPCIRFCCPRNKMMPNSRCSDGLTENLKRINPYLKITLEDGTIGKYYLLTDMIVLRYEFRYCEKVVSVQEDQYKLYEVKISIFLKYLSII

SEQ ID NO: 130 - DNA, 6552 bp, Drosophila
agtatatacgagtatatcctgtacgactatatatcaaaccgaaagtcgaactgaaagtgtcctctaagcgggactttcatcgaggtcggtgcccctcattatcgtattcatttgtggggctcatttgattcattgtgtctgttcgtgtgtgttggcgtgttactctgttaagttggatgcaattctgtcgccgatggttgtggttttgtgtccatggcccatcaatggggatgctccatccatgtggatgggcggtcagccaactaacttggaacattcgtatgtgatgtgtctgtggtggagggcgccgacctcgaggcccgctagctactgtatccaattgaactgtgatttagctaactaactctaggtaccgacacctcgtgtcggcgtggaacaatccggcctctaaggatatgaatttctttacactcgcttacctaatcgtactgtgggaatcggaaggaaggttctgtgtgccgtgggttttggttttgggtgggaggaaaagcttgctgctcgtgatatgtgataggttgtgggagcagcccactttgaaggacactactctattctggtaaagcgaatcgtatccttggcgttttgcttacgtctactttggaatcataatcgcgtgcttgctgtgtgttgattatatcgctacttggggtttgcttaatgtaattgttaaaaattgtacctagcctacagcttgcaatccaccgttcatgctccacatagcatatatgtatgtatgtagtttagtggtatgtacagatctatttacataagtagctagtagaaccttaaagctattgggaaacgcaacgaacgacaaacgaaacgaaactggagcccaattgagatctctgctgcaacgatggcctccatttggcacactttgccatcctctcccgggctttaatccattccacaagggacccatcatccaattgcctattgctataactattgctggtgacgtgctcgccgttgataatcaccccatgtgcatgatcttcttgaaggccttgcgaaactcgggattgaatattgtgtagataaccgggttcacaaagctgttgatgtagcccagccaggtggtcatcatgtaggcggtgagcccaggtcggcagtctttcttgaacttggcgcacatggcgtccatgatgttgcagctgaagaacggcagccagcagaacaggaagacacctgtttgagggtttgaaggttatatatatgatggcatatggattagaatatggcagagcgcaaggacgtggtccaaaacggctgggggaggtggctcaacttgaacttacccaaaacaatggccaatgttttggtggccttgcgctcctttttggccgacgatttttcgcgtttctttttcgaggccttgtgcaccttgtatatcgtgaatctgtgcgtcacgcgaaggataataggccatggtgtggtatatattgcattttccacaggcaaaaaaggcaaatgatgaagagaggtagagaaggcgagaaggaaatggggtggcattagcatcgactggccaacaagagcccaaataactaataactgtaattaggggcaatggacggcgttactcaccttgacgcctgcgagttcttcttatccttgcgcgaggacgttttcgatgtagtcgatagcgtcgagtcgttgcgtgccaaagtcatggcctcctgcactccgtaccgcacaaaggacaatggcttcatggcgacgctgcgaacggaagtcggtcggattcggaatgagaacttaactgcggcattacgtactactagtcactatttttgggcttgccggattgcctacattgccaacatgcggcttctattttgggggtttcgaggataaagtggcaggtttctcgctaaacactacgtaataggtctgtgatgaaaacgtgagctcttttttgctaagcaacttaaatcaagcgattgtgcaagaatgccaccaaataatcaattgatgatttcataagcctgctgatatgtaaacatgccgacaataattatgaaaagtagtggcaagtggcagaactaatactgcaaatcactatttaaatgtgcaattggatttcaatctgtttgaaaaatgtaatgtgttaaaaaaaaaaaaaacatgtaatagttgacaacaataacccgacatatttaattaaactttgccatttgtttaccaattaatatttggaagcaaagatgttgacatttttgacgcggtcaaactctttgtctgtttttattgaacgaaaaaagccatgcgtgttatacgcatttattgttttgtttataaataatgacaattgatgtgtgcaatttaagcaattttaatatgctacgtaatctagtgtaagtagataaaaaaaaacattgcgcaaaaagagcactgcctatagctgaaaaaagtattatattattcaaaaactatgtacaaaaacttgaatgggaatgctttattttgtcgggctgcaaaaacagttcattaaacttttaaactgttgcgaaaagtttcattttacctatggtacaatcaaaaagaatgttgttcaatgatttagtaccaatgtggtacagatattggacggtattttgttttttttttttttctaaatattagcaatttctcgaatttccgatataattgccggaactttgattttaaaacaataacttggatgaggcattatgtttttatccgtgcacgaacttctactacgcccccaactactggggatgctatttctaaggtggcaggcttacggatctgaatgccaaatacctggagttatcgacaccgactgacctgagggcgggttcgccgcgcttcggcgagtcgtcgccggtggggcgccgctgactgctgacgctggatcgctggagggtggcgccactgggcagcggactgtccggcggcgagccgctgctccgcggagcggctgatgtggcagcagaggcggaggcgggcgccacgcctgcaaggacatcgtcaacgtttgaggctgcataaccagaatcatgattaccattcggatcggcgacgaccagctgcggctgtgtggtgatttgggccacaacgctgctgcgagtgcgttatggcaatgtggagcgatgtgacggtggggttatccaattaatggtgccgcgaccatatccatcaatcaatcaatcaatcggcgatagacgacgagtgggcgaagaagcagcagaatccggcgttgatgaaggacgaaaagatggaaaatcggggtgcaacgtcaattaaaggcaaggcaagattgagttttaataaagtgacgcattaattgaattattgagaattatttttctctgccattggctgtgatttcttttggcgggtaaagtttcgcggtcttgtttgccatccatttcagcccatcggttcggttcggttcggttcggatcggatcccatccctttgtgcatccagcctcctgtcattaatggtttcatttcatgtccttattggattaagcaggccatcaggatgctaattggctgcgcttaacgctcgcacttaatggcggtttcggccaggaattgggagaaagattcgaatgccgtggggcggggacatccgattgcaaggatgatgggcaagggatcctttcggcaggacctgattgaaagtgcagcacgcttttatgtcggcaattgagtgccgctgtgtccggacgaagcctgccattagattgacagttttccatgggcatgcaccgtctgggggtccattgctttgctggtctgctggtctggaaggaagtgcagtcgagaccactcagcagaaacaggcttatctattacgtgtttggggcacgtgccagggctgtcagggttgtcaggttgcaagttgcaagttgcaagcggacaaggatatggacacggaaacgaaactgctgagctccgaacttttgcagggccatcggagatagcccccagccaaacattcgttctccaggcgatggagttttctgcgaaattcgccgaaagtttccgcttttcataccccgttcacgtaagatgtaagtgggtttgcaaatgtacatatatgtccaatccgactccattggcaacgtgtttatattcgtgaagtaacattagccgccaaaagaaggtcttacacagccaaaaaaaaactttgtgaaacgtatatttcctttttgtatattccaaatctgatttaaagctatcatgttctacgcatttctacacagcacatcaaagcccctaaatggtatcgtaaaatgagtactcacttgcccgtctcctcgacaacggtggccagcatgaactcggtggacttgtcgttcacgatgacgtggcagtcgtcgatgtccggcgagatggcgttctcgtcctcctcctcgttggagccgctggccgtgttggtggcggcctcgtcgggcagaatcctactggcgtggcgactgctgtccagggccgtctccgccaggcgccgggtctgggcaatgttctcgatgacgctgccgcccgtgagttccgataggtggggcttgcgggccgcccgctgcttccgcgctcgactcctcagcgcctgtgggtgggtgggtacgagatgtaaaatacagaaaacagtataccaaacatgggacacaggatacagactacggacgacggaccacggactacgggctgtgggacacgggatgcaggatgcaggatgcaggatgcagtagagagcggattaggcactgccatgctgcgcttgcatcctacggatattcgcccccagtcagcagcaaatgtgcacaaacagaaacagaaacaggaagagaaacagaagcatccccaagccagcattgcagattatggatctgcgccagcaatattcattccactcgactcggagaaatccgattttaattgcggtcttttaataatagtgcttgaaatttttttgcgcaatggaaagagcgacagaaagaccaaagcgcggaaaattcgctctaggaattaatgtttgtgggaagcttggagtgttcaaaggaattaacatgtttggaatatatcgtatatatacatatatcgctcgctactcaccttgaaaatgttccagtagagaaacaccatgatgatgcagggtatgtagaagctgctcagcgaggagtagagtataaagtcggcgttgtagaaggcgcatacatcgggttcgcggttgggcgtgttgttgaggcccagaactatcggcgagccgatggcagccgatatggcccacaccagcagtatcgtaaggcaaacgcggcggctatttttgtgcttggcgtactttattggctgtgtcacagcgatgtatctgtgggatatatccgtggaatgtgtgcttgggtcatatgggtctccgaaataggggccgctgtgaactcacctgtctatggagatggcaactaagttgaatatcgatgaagtagagcatatcacatccatggctatatagaaatcacaaacgacgtcaggcagggcccaggctccatttacctgcaaaacaaaaagaaggagggggggggggcgtcaggtaagaacgaggatgtgtatgtcgatgcggatgaggagcacacttcatttgttcggcacttaatcgactcgggaatggagctctattggaatgcccatcctttgtcgaatattaataacaatattttcccatttcccgtgctgctgccacaaattagttttagactctatctcttcatcgacgtctccggcagcatctatgttatggcccaacccgaatgcggactccataaaaaccccaacaaaaacgtcaggaatttcccaagccaaacaatttgtagcacacaaagcacataaaaaaaggccgagtgggccaccagttcggttggaacttaatgtggatatgtttgggtgaacacccaacctgtcgtggttgcactccccatagcccgtgtacgaggtatacataatgtagcgccaaccgattcggtattagaatggcatcgatagctttttggatgtgaatactattagtaagtagaggtagctgtcacataggtatttgttgactgatctgcgggtaagaggtatcgcatagtcgaatacactcggcggagccagtttcccagaatcagtagtttaacattttaagaagtcaatatttgaataatactactactacatatattgtacttatatgccaccaatgtgtgtgtgctaactaaaatgcatgtagacggtatcgaatagtcgaagttaatcgaccctaacgtactatcttgtttttcttcttcaatcggttttgcgcctaaattatacaaacacattgaaacttgaagcggggctcaacgcgtgggaagagtgtaaaatattgatacacacgcaaccacaccacacgaaagtaaaagtgaaagtgaaagtcaagtgaaagcagcatagaaatgtgctaaaatagctgggcagtcgcagacttggaatttcttagaactcggatgaagactccttagccggagctaagcgagcataacaa

SEQ ID NO: 131 - DNA, 1392 bp, Drosophila
ttgcaggtaaatggagcctgggccctgcctgacgtcgtttgtgatttctatatagccatggatgtgatatgctctacttcatcgatattcaacttagttgccatctccatagacagatacatcgctgtgacacagccaataaagtacgccaagcacaaaaatagccgccgcgtttgccttacgatactgctggtgtgggccatatcggctgccatcggctcgccgatagttctgggcctcaacaacacgcccaaccgcgaacccgatgtatgcgccttctacaacgccgactttatactctactcctcgctgagcagcttctacataccctgcatcatcatggtgtttctctactggaacattttcaaggcgctgaggagtcgagcgcggaagcagcgggcggcccgcaagccccacctatcggaactcacgggcggcagcgtcatcgagaacattgcccagacccggcgcctggcggagacggccctggacagcagtcgccacgccagtaggattctgcccgacgaggccgccaccaacacggccagcggctccaacgaggaggaggacgagaacgccatctcgccggacatcgacgactgccacgtcatcgtgaacgacaagtccaccgagttcatgctggccaccgttgtcgaggagacgggcaacagcgttgtggcccaaatcaccacacagccgcagctggtcgtcgccgatccgaatggtaatcatgattctggttatgcagcctcaaacgttgacgatgtccttgcaggcgtggcgcccgcctccgcctctgctgccacatcagccgctccgcggagcagcggctcgccgccggacagtccgctgcccagtggcgccaccctccagcgatccagcgtcagcagtcagcggcgccccaccggcgacgactcgccgaagcgcggcgaacccgccctcagcgtcgccatgaagccattgtcctttgtgcggtacggagtgcaggaggccatgactttggcacgcaacgactcgacgctatcgactacatcgaaaacgtcctcgcgcaaggataagaagaactcgcaggcgtcaagattcacgatatacaaggtgcacaaggcctcgaaaaagaaacgcgaaaaatcgtcggccaaaaaggagcgcaaggccaccaaaacattggccattgttttgggtgtcttcctgttctgctggctgccgttcttcagctgcaacatcatggacgccatgtgcgccaagttcaagaaagactgccgacctgggctcaccgcctacatgatgaccacctggctgggctacatcaacagctttgtgaacccggttatctacacaatattcaatcccgagtttcgcaaggccttcaagaagatcatgcacatggggtga

SEQ ID NO: 132 - protein, 444 aa, Drosophila
MDVICSTSSIFNLVAISIDRYIAVTQPIKYAKHKNSRRVCLTILLVWAISAAIGSPIVLGLNNTPNREPDVCAFYNADFILYSSLSSFYIPCIIMVFLYWNIFKALRSRARKQRAARKPHLSELTGGSVIENIAQTRRLAETALDSSRHASRILPDEAATNTASGSNEEEDENAISPDIDDCHVIVNDKSTEFMLATVVEETGNSVVAQITTQPQLVVADPNGNHDSGYAASNVDDVLAGVAPASASAATSAAPRSSGSPPDSPLPSGATLQRSSVSSQRRPTGDDSPKRGEPALSVAMKPLSFVRYGVQEAMTLARNDSTLSTTSKTSSRKDKKNSQASRFTIYKVHKASKKKREKSSAKKERKATKTLAIVLGVFLFCWLPFFSCNIMDAMCAKFKKDCRPGLTAYMMTTWLGYINSFVNPVIYTIFNPEFRKAFKKIMHMG

SEQ ID NO: 133 - DNA, 2970 bp, Drosophila
tccatgccaggcctggatgcacatgggccggatggggatcaggtatatatcgagagcgtcgagagttcggtttgcgttttgcccaccaagacgaaacccaaaaaggtcgccttttacggcagcaatggtcagcgctacactttcctgttcaagggcatggaggatctccatctggacgaacgcatcatgcagttcctgtccatctcgaatgccattatggcctgccgcagcgacgcacccggcaatggctgctatcgtgcccaccactattcggttataccattgggaccgcaatccggactgattagctgggtggacggggtcacaccagtctttgcgctctacaagaagtggcaacagagacggtcccaagttgctgggaatgcgggagcaggtgctgtggcaaatgtcccgcgacgtttcacagacttgttctacaacaaactctcgcccctgttggccaagcacaatatgcaggtgagcgatccacgacgccaatggccaatatccgtcctgctccaggtgctcgacgaattgtcacaggaaacacccaatgatctgcttgcccgcgaactgtggtgccaggcgggaaatgccgccgagtggcggcaatcggtgcgtcgctttgtccgctgcatgtcggtcatgtcgatgattggctatgtcattggcctgggcgatcgtcatttggacaacgtgcttatcaacctgggaagcggcgacatcgtgcatatcgactacaacgtgtgcttcgagaagggccgcaccctgcgcatccccgagaaggtgcccttccgtcttacccagaatctagtgcaggccatgggcatcacaggaatcgaggtaagactattgctcatcctataccaatcaattatctcaacaaatcgctgctgggggtgtttaagaaacggtgctcctaaagataatgtccacttttattgctatatctccatttaattctaccaagttaaagcgttgggtttcccaattccgttgatcactgagtggccttcggtttgatctcctgagatgaggatgtggcctccatgcggtgcttgctgtccgccggcaattgatcctcgcactgcctcgccgttcggcagcataatgtttggacaaaggctcgccgaaagccagagttcttccacgagtagataatcggattgagagcagagttggcaatggccagagagaacgtcgtcttgtagatcatcgagctgctctggcagatgctaaatagctgggcaatggccacacagaagtacggtagccaacagagcgtgaagcagcccatgatgaagaccacaatctggacgctcttccagtctggatggagcagcagatttcgcatggtggtggcctcgtccgtgttgtagaccaccgactgtcgcaatcgcagcgcctgcttggatgcctcgcgcatgatgcgccagtagacgaggaacatacagatccagatgatcacaaaacccggcgttatcactccggcaatgtaaccaggcgcgagaacttcgtcgaattcgcacgcctgtgcatccggccatcgattccagaacactggcagcagagccaccaatgcacccaagcaccaattgaatatgatgatgctatatgccactcgacgggtcatgtatctacggtttcaaagggtttcacatatgtagccattgaattaggatttatcgcgttcgcttaataccttaccttctatagtgcagagcatagacgactgctatataccgatccaccgcaatcgagatcagagtcaacatggacacgcagcaggcgcagatgagcaggaagaagcgcagcaggcagggacctctcatggcgccaatgtccgagcccatgtaaaataccagatgatagggcagtgccagtcccacacagaagtcggagacggccagcgacaggatgaacagattggagatgaccgatcgcaggtggcggcaggtgcgcaccgccacaatggtcagaatattgccgcccaggataaggacaaacaagaaggcattgatggctagccacagcagatggccggcaccgaaactggtcgcctggagggttatttccgttggcgtttccgtggcgttctggtgctgccacaggaacgggacgacacccaacgcttccggggagcttcgataatcccaagcgggcgatgagctgctggtaaatgccatgagccacgatggtaaacgaagcgcacgcgacgccagtggttggctatctggcaaccgtgggagctggagttgtgctgacttttggccaggacttcggctcggctcggatcggattcagattcaattgggtttcggctcggaccgtgggcgtcgtttgtttacgtttcgctggtggctttacgacatcgtcatcgcgccagttaactgatagcgcgcccagatccaccgtgagaactgcaatccgttgataagccctccactttggcccaaccaccattcaccaccctcatacctaaccactcacccacccatcgagtcaatccaaccactccaaccagccaaactatccattgcccccgagtatttcgagtgtccggactcccgggcccaatgcatggccaaacagatcgctgggggttttagcagattagcccagctccgcggaccaaaatagattgataaaaggccagggccagcaactgggatacgtggtaaacagatacatcattgatattcccaaatttcctcgatacattgcaagcgaagaaactatatgtaaatagtgatatcatcataattgttataaatccgagaccaacagtacaaccagtactattaggattgacatggttatccactcttggttcttttagaattagaaatcaggagaatatatagtatatataggtacaactctctgatctaatcccatatttgaattatctttaagatgagatattaaagatttcatggatcagaacagaccaggagtttgctaaggatg

SEQ ID NO: 134 - DNA, 1116 bp, Drosophila
atggcatttaccagcagctcatcgcccgcttgggattatcgaagctccccggaagcgttgggtgtcgtcccgttcctgtggcagcaccagaacgccacggaaacgccaacggaaataaccctccaggcgaccagtttcggtgccggccatctgctgtggctagccatcaatgccttcttgtttgtccttatcctgggcggcaatattctgaccattgtggcggtgcgcacctgccgccacctgcgatcggtcatctccaatctgttcatcctgtcgctggccgtctccgacttctgtgtgggactggcactgccctatcatctggtattttacatgggctcggacattggcgccatgagaggtccctgcctgctgcgcttcttcctgctcatctgcgcctgctgcgtgtccatgttgactctgatctcgattgcggtggatcggtatatagcagtcgtctatgctctgcactatagaagatacatgacccgtcgagtggcatatagcatcatcatattcaattggtgcttgggtgcattggtggctctgctgccagtgttctggaatcgatggccggatgcacaggcgtgcgaattcgacgaagttctcgcgcctggttacattgccggagtgataacgccgggttttgtgatcatctggatctgtatgttcctcgtctactggcgcatcatgcgcgaggcatccaagcaggcgctgcgattgcgacagtcggtggtctacaacacggacgaggccaccaccatgcgaaatctgctgctccatccagactggaagagcgtccagattgtggtcttcatcatgggctgcttcacgctctgttggctaccgtacttctgtgtggccattgcccagctatttagcatctgccagagcagctcgatgatctacaagacgacgttctctctggccattgccaactctgctctcaatccgattatctactcgtggaagaactctggctttcggcgagcctttgtccaaacattatgctgccgaacggcgaggcagtgcgaggatcaattgccggcggacagcaagcaccgcatggaggccacatcctcatctcaggagatcaaaccgaaggccactcagtga

SEQ ID NO: 135 - protein, 371 aa, Drosophila
MAFTSSSSPAWDYRSSPEALGVVPFLWQHQNATETPTEITLQATSFGAGHLLWLAINAFLFVLILGGNILTIVAVRTCRHLRSVISNLFILSLAVSDFCVGLALPYHLVFYMGSDIGAMRGPCLLRFFLLICACCVSMLTLISIAVDRYIAVVYALHYRRYMTRRVAYSIIIFNWCLGALVALLPVFWNRWPDAQACEFDEVLAPGYIAGVITPGFVIIWICMFLVYWRIMREASKQALRLRQSVVYNTDEATTMRNLLLHPDWKSVQIVVFIMGCFTLCWLPYFCVAIAQLFSICQSSSMIYKTTFSLAIANSALNPIIYSWKNSGFRRAFVQTLCCRTARQCEDQLPADSKHRMEATSSSQEIKPKATQ

SEQ ID NO: 136 - DNA, 7659 bp, Drosophila
gcctaaacgataagattagaaaatggaaatggaaatgaagacagccacctgacgcaatctcacatgccagaaatttgtcgtttgccatccaaggccccgatttccgaaatcgaaaatccttgatatccaactggacatgaccagtttccggaggaatgcactccagttacacaactggcacaaacatttgtttgctgttttctgaccaaaaacaagccacacttatgctggcacttttttgttgacagaaatatgcaagcagacacaagtaaatatttatttgattatttattttaaagaaatgtgcaagctcaccgaataaatattatattttaaaatcaataagtagaaacctaaacaaatacaagctggtgaagcgattgctctgcaaattccacatatttaaactattaatttacaaaaataaatgtggcggtcaatttccagctgaacagttctcaacaattaatgaaaataattgccactgataataatagttttttttattattcgattacatactttaaatatttttttagtttcccaattagaaaacttttttttaacaaaatatttaatattccgtaacagtatttatgcttaattaccagatgacagtttttatttcttttgactatacttacattattttgaaaaaatagcaattatttttagacttctgccacgaatgcctttaattaatagctgatgcaatcgcttaaactcaattaagttacacacgcaacccacatcttctgtgtaaaaaaaaatcaatgtattcgaccataaataattccgctgcaatcagtgcaacagtattcagtcctggaactttaatagcgccaagctgttggaaaaccaattaaattccctttcaaatggagcgtaaaacgcaaaatacttacgtatgatgggggcgccacacactcgcacacgcatttatgagctcggcaaaacccatttgattgactaacgaaacttatttgccactttatttcagcggacgcagtgcagcagttccacgacgaccatgagcgaccagattggcaaccccaatgcaacattcagtggcagtggcagtggcagtggcaccaacgtcgcctccatcgccgaaagtgtggcggagagcggaccggacttcgatgcacttcgggccgcctgcgaaacgcggctaaatgccagcggtcaactggcgggtgagtcgtgcactgcgagaaaatatatcacacagcacataactattaaagtttatgcagttattttatttgatgcagttgtaaaacgctcaccagtaaatttcatttaaattttagatgtttttataaacataaatcaaaataaatttttttgcactgttttacttacattccctttctttatgccagttatttgtctttacttaagcgaaagaaaaaattcactctgaaattgtagcactagggaaatataacagtttttggtatttcactacatatttttgcccgtgcttctggctctggccaactgcaatttcggcgtccattatgcacgagtaactttaaattgctgacctaaccactcccctttccttttggccccttggcaaacaggctccggaggaccaggcgcagaagcaggaacccactgtgccggcacctttgatggctggctttgttggccggatacggctgtcggcacttccgcctacgaactctgcccggacttcatcacgggattcgatccagcaagtaagtgcgccggggcaggagctgaattgtttattaaattccacaaagctacatccgtttcggggtcagctggggatctgcatatgacacgaaaaaatatatatatatacatacatatatcacatgtatgtatgttacatataggttaaatagcatgccaaagggaaatgtgtttgcacgaggcaatgcggttggataagttggttgggttgtttggtaggtggagtgtgccagtctaccctctaattgggctcatccccgagctcatcgttatatacacataaatggaacagaaaatacgctccaagccaggccaaatcaattggaaacttgttatgtttatgctttgatttcgtgtcgtatggaaacatcaagtattcacaaaaccacacgggctaaaggcaaagctccttggagctccctgggccactaaattatccaaaagagctcgacaaaatgctaaaatgtttcgcctgatttggcacaatttgccagagtctaaccgaaatcaaatgtaaggcagaaaacacggccaaattgattgaggctgctgggcagagtagaagtcaaatatgtgtgtgggtatttaaagatgctggagcacgaagaaaggggatttaaattttatcatgtttgtgaatttcatatttttttaatcattaatcagtgttcttggcaaggtgttgatgacggtcataataacataactgaagaagaaaaccctttgaatagtttcaccaactcattgtcgtatcattaacatatcataaataaaaatatcaaaggtgacttgaattatttctcaactttctgccacactgcgtgtatttcattcaattataaatatatatatatataaatataaatataaattaatcaactgattggccaaacgcacaaagaaaactaattaattatgcttggcattaaagcaaacgtttaaaaacaaagcgcacgctctagaaaatcgtcataaatgtggataaatatttgaaccaatttatggcataaatcatgcgctgcatgataatttgcattaatggtatacaatatgtagccagccaacttaaacctcaacctcgttttggccatgaccagggcaacgaaaatagcgagagttgaatgactttttttgttatgacagagcggagaaaaacaaggcgagcgtcaagaaagtgctacttttgctacatttagcttgtggttagcatggcgccaccccctttttcatcctttttgcatttttttttttgccttacggggtcgccgccagcttgtacaagattatgtgctttggcactgcgccgccattaacttttatggcacttccggtcgccggatgtcgatgtggtgagctgtggtcgagaactccctcaccccccggctacttatctgccacacagcgcgtatacgtgattttctcggtctgcgtgccaaacggcgataaatggattcttggccaaagatcatcggtcgaaaaaaaaaagaaaacggaagagccggaaaaacgaacgacctgataaaactcaccttcgaagttcctaacaaaaattctccagtaatttttctacaagtgccactcggtaaattgcattgcaaacttggtaatctacaatcgaatcgaatggaaagtttttgtcacgaacttcgaattgattcgacttaaacacacacatgacccaaacaacagaatgattatgcaattttcaaattgatatgcttgcaattcgaatgcgaaccgcaattcttttgcggttaacttggtggcagatgcaataaataatggttaattcaattgaatgctcgggccgaccgcaaaatgtaaatatgagccggaatatttatgcagtagtcaatcatgaaatcacacatatttagcaagtgtaaatatttgtgtggtgcacaggatgtgaaaatgtttgctagaaaaaacggtaaagaattaatcgtatatacaatatttattgaggagctgtaataagcagagtaaacagcatggttaattattttttatttatcgcaaactgacattgctttaattatgcaggatatgcccacaaggaatgcggtctcgatggcgagtggttcaagcatccgctgaccaataaaacatggtccaactacacaacctgcgtaaatctcgaagacctcaacgtaagccgatcccatacataaatatcctatatatcctttatgtaattaattaatcgcaacactatatatccagtggaggcacacagtgaatctgatctccgaggttggctacggcacctcactgctggccattctgctgtcgttggccatattgggttatttcaagtgagtatggccaagggctttgcactccttcatcttggccacaagttgacagcttcgttgggagatggcaaaaacacttaggggtaatgaggcacgctggtgacttatattgcgacttatattatgacgactggcgccataagtgaaatttactgatggcaaacaaatgcgacagtggcttaatcaactgccaacctggatgctggatgcccaaatgctcattgcactcattgctcatttaatgcggcacaattgacgccggaaatgggaaaatacattgtgtccccatctcctggtgactcgaagcaggatatcgattaatttcccagtgcctgcagaccaattagtgctctgggtttgtttatcgcacattcgaatggaactggggctcaaggataaaggataatggatgtgcggactgaggggcgagatcccatagacggttcggccaactgacagaactgttttaaattgtgtgccaaaggcaaataaaatgggtccagatacgtgtgggaatttggtctgccctaaaaaagtgaataattaaaagtttaatgacagagcaatgggcaacaccagccccggaaaaacgcattcctcaaacagctgtaatgaaaataccagagttttcattcaaataaaatataagagtataaaggaaattgagtcgttgtgagcggccaaaaataaataaagaagtattattataaaatataccatcagtatattctcagtcaataattgtattgcttaaagaaagtttagaagtgaaaagtagtatataaaataatttatttagacagaagtaaattaagtaaagtagagaagggattaacgaaaacaatctaacctattgaattaaattgctgaaaagaaatcaaactagattcagtttggccagatgtcagcaatcaatgcaattgagcaaaggagaaacggaaaatgggaaaatggacaaatgaactttgtccttttggtcgcaggactttttctgcctctttcggccctatccaagctgcctcacatgcccctggccccgaatgcaaatgaagccatagacaaacttgcaaatttggccataaaaacttgccacaaattgccggccaaagtaattcgattcgcatatttgtctttcgattgaacagatccctgaagtgcgcccgcatcacgctgcacatgaatctgttcgcctcgttcgctgccaataactcgttgtggctggtctggtacctgctggtcatgccgaattcggagctactgcatcagagtccggtaagtgtgcacacctggcgaatgcgtaatggtgaatcaacctcggcttccgatttccatattccatactccgtgcgaacacccagatgcgctgcgttgccctgcacataacgctacactacttcctcctgtccaattactcctggatgctctgcgagggattctatctgcacaccgtcctcgtcgccgcattcatttccgagaagaggctggtcaaatggctcatcgcattcggctggggctccccggccatcgtcatattcgtctatagcatggctcgcggtctgggcggcacgcccgaggacaatcgtcagtaagtgaataatgaatgggtacagcttacaccgaaagaaaatgaggaatgccaatagttatcaaaagtgaccgacaacagacaaggtgtaaccatattgtgttgtctagaagtatcctagtttaatgaaatcccacagacttgagtatcacagattgatatcaagatatttctgtgtagctaagatattcagtctgtcgagctcttgaccaaatgctaatcaaatcaatcagcaattcacccactgactcatctcgcattccttcgccaacttgcagctgctggatgaaccaaaccaactaccaaaacattcttatggtgcctgtgtgtatctccatgttcctgaacctcctgttcctgtgcaacattgtgcgagtggtccttttgaaactgaatgccccggccagtattcagggcagctgcggtccatcgcgaacggttttgcaagcatttcggtaagttttcccgtccaaaacaaaagaaaaaaaaaagaactgttgggggggagattgaaacacttataagcgaagcagagaactctcaactggcccacggggcgaatgcgtaattatattttgtttcccttgtatttagactctttcccatcggccatcaggtcttttattgtttattcgctctgcactctggaagttgggctcattttacattttgaattacgcatacgccgcgttgacttgcatgttaatacacagctgaaaaacgaaaacaaggcattataattcaccctctcatcctgttttagggcaacgctgcttttggttcctctgctcggcctccagtacatccttacgccctttcgtcctgcacccaaacatccctgggagaatacatacgaaatcatctcggcgtttacggcctcatttcaagtaagtaaaatgttttcgtttcgtttctgttctcgtttcgtttttttttcgttttttttttttgcttttttctttccggcttttgttttgcacgctctcataaaatcactttacgactccgagctggctaaaaagttatgatgttagttcgcctcatggtgccatccaccactgggaatgcaaataagccagcattactggaataccgaataccaaataccaggactagcagctcattagatcggggctcttttcaaatcaataatgaaaatacacgccatgtgaaatacccaccattggcatttcacttgatctcagtttattaaattgctggccgagattggagcgaagttcccccgttggaaaaatgtagcaagttgagcatgaaatgcactctcgcacacaggaactcgtaaaagcaactcgagcttgtccctcggccaactcagtctcgatagaccagcatttacacatggttaacacacatacatatatttcttggccgcaacttaaagacaacgacggcaaacttcatccagctacgttgccttcttgtttgttgaatacccaaagaatctttcagttcatgtttgcagtacacagataaaataatttgcatatattttcgtgtttttgtgcacgaaatggtttttcattacagactgttgatataacagttgccatggaggtagaggtgcctaaaagtatgttgcagcttagatggctttcctttacaaaatttcaaaagtaatttctaaggcaccccctagctgttattcgaaaatcttttagttcgatctaaaacccaactcaatcggttcaaaaaggtagcccattgaattcataaacagccctaaaacaacaggaaaatccattatcttgcgagtagacataaaatcatcttgggtgccactaagctgcagttgagctcttgactattttctataacttggcaaactgaacattgtcacctcggtctgagccttttttcatcattgccaatcgataggtgaaatcttttattcgactgctaaaagtttaaagccagtcgacgggtacttttcctttgcattttcctcttgtcgtatttattcacttttttttatgtcgctgttttccgttggcttatttgctgcaaaga

SEQ ID NO: 137 - DNA, 1365 bp, Drosophila
cggacgcagtgcagcagttccacgacgaccatgagcgaccagattggcaaccccaatgcaacattcagtggcagtggcagtggcagtggcaccaacgtcgcctccatcgccgaaagtgtggcggagagcggaccggacttcgatgcacttcgggccgcctgcgaaacgcggctaaatgccagcggtcaactggcgggctccggaggaccaggcgcagaagcaggaacccactgtgccggcacctttgatggctggctttgttggccggatacggctgtcggcacttccgcctacgaactctgcccggacttcatcacgggattcgatccagcaagatatgcccacaaggaatgcggtctcgatggcgagtggttcaagcatccgctgaccaataaaacatggtccaactacacaacctgcgtaaatctcgaagacctcaactggaggcacacagtgaatctgatctccgaggttggctacggcacctcactgctggccattctgctgtcgttggccatattgggttatttcaataattcgattcgcatatttgtctttcgattgaacagatccctgaagtgcgcccgcatcacgctgcacatgaatctgttcgcctcgttcgctgccaataactcgttgtggctggtctggtacctgctggtcatgccgaattcggagctactgcatcagagtccgatgcgctgcgttgccctgcacataacgctacactacttcctcctgtccaattactcctggatgctctgcgagggattctatctgcacaccgtcctcgtcgccgcattcatttccgagaagaggctggtcaaatggctcatcgcattcggctggggctccccggccatcgtcatattcgtctatagcatggctcgcggtctgggcggcacgcccgaggacaatcgtcactgctggatgaaccaaaccaactaccaaaacattcttatggtgcctgtgtgtatctccatgttcctgaacctcctgttcctgtgcaacattgtgcgagtggtccttttgaaactgaatgccccggccagtattcagggcagctgcggtccatcgcgaacggttttgcaagcatttcgggcaacgctgcttttggttcctctgctcggcctccagtacatccttacgccctttcgtcctgcacccaaacatccctgggagaatacatacgaaatcatctcggcgtttacggcctcatttcaagtaagtaaaatgttttcgtttcgtttctgttctcgtttcgtttttttttcgttttttttttttgcttttttctttccggcttttgttttgcacgctctcataaaatcactttacgactccgagctggctaaaaagttatga

SEQ ID NO: 138 - protein, 444 aa, Drosophila
MSDQIGNPNATFSGSGSGSGTNVASIAESVAESGPDFDALRAACETRLNASGQLAGSGGPGAEAGTHCAGTFDGWLCWPDTAVGTSAYELCPDFITGFDPARYAHKECGLDGEWFKHPLTNKTWSNYTTCVNLEDLNWRHTVNLISEVGYGTSLLAILLSLAILGYFNNSIRIFVFRLNRSLKCARITLHMNLFASFAANNSLWLVWYLLVMPNSELLHQSPMRCVALHITLHYFLLSNYSWMLCEGFYLHTVLVAAFISEKRLVKWLIAFGWGSPAIVIFVYSMARGLGGTPEDNRHCWMNQTNYQNILMVPVCISMFLNLLFLCNIVRVVLLKLNAPASIQGSCGPSRTVLQAFRATLLLVPLLGLQYILTPFRPAPKHPWENTYEIISAFTASFQVSKMFSFRFCSRFVFFSFFFFAFFFPAFVLHALIKSLYDSELAKKL

SEQ ID NO: 139 - DNA, 4185 bp, Drosophila
attcgttcggtattttcgcatttggcatgtttgtggctaagatatcatcaattcaacacaatgatcaacaatattcaacgacaaacactcgacttgggaccctggatgcttcatcggcggcgctcgggaaactgaatttgacccactaagggaactaggcaaaattgcaacgctctgttggtaagcccaccaaatcgaagcgttcaggggcggccaaaaggaaaatgaatcattctaccgatttgaacaacgatcgaaacttcacactagcctatcatttcagtatcatagttgtatgttgtatggctaagaactactggaaatgtctttttgggcttatttgctttttggattttaacatatttgctgtgttttatattcgtttagtgggccttggtttttcgtttcttaagcgcaattcgcaaagcgtgcgaagattgaagattttccgaattttgaattctcatatttcggcccgtcgtcaagtttggcaaattgtttaataaacgctacacgatttcattttgtaaaattctaaatgctacttaatatggactttgaaaaaggtttatacttatgcaatctttagataataatcctgctgctcgagtagcatatgattttcgtatattgtttttgttgtagcaagttcgaattgtaaaccggaaacggaaatgttgctcttgcctagtgaattgtctcttgtctacgaattagaattagaattagatcgctgctacatatgtatatgtatatggctagagttaagtacaagtatatatatacgtggtaagctcataaatacacaataataatcgtcaatcaattcaatcaatcaatcggtgaatcaatcataattggatacgctaaaaactcttagcttagcttaggtctagaaatatgaatatgtctttcaacgtgtctgtggttttggtgtttttggtgtttctgtgtggtttgctgtatggtggctgagtggttgagtggttgcgtttttagttttcagtttttctgtggctgtgactgtggggtggtgctttcattggcatgtcgcgtagcgccaaacggcccgtaaatatgcaactatatggcaaacaggcaagtaagtgtttatatatattgagagagagagatatatagagagttaaggaaatggctcaatgcaattacaaccaattatttacttgcaggactttgtagttcttctcaaagggattacggaggatgggtttgggagggggatttttacggataattattgtatttttttttgaggagaatgaaaatctaaatctaactctagtcatctgggtccaacccgattagctctgcttgcaaacggcccttagtcttacaacaaatggttaagcaaaatactctcaaagcgatacggaattgcggcgacatactggtcatgatcagaattttccaaaacgaattcaatatgccgatccagacgacggcgaagttgataagagtactttggataacatcgcccgtgaccacctcgtacagacgcaacagaatccatggcagccaggacacccagaatgcaaagactaatgcgaatgacatcatatgactagggttcgataaattttcagccagagcagttgcatattctttatcgtgtatcggctcgccggacctaatcttacgcatcattacaaagatatagccgtagttgtgtacgattgaaatgaggctgggacctaagactaatatcgccaaggtggcgctatatgctgccatattcccccagtccagcatgcaaatgtgcgtcatgttgttctcgatgggcatcgagtagcccaggattgggggacagcacagcagggccgccgatatccaagtgaacaccatccagcattggcatctgcacgataaaggtcacaagagatcaaagattaatccagttttaatccagatgaggaggaattcggggttccattggcgctactcacctcgttttcgtctgcaccgtttcatatctgagtggcttccgcaccgcaagatagcgatccactgatatccacatgaaggtgtataccgataccgcccacagagtgacctccagatagccggtgaagcgacacacgatgtcgccgtacatccattctccggtcaaagcgggatacacggagaagggcaccaccaggagtccgcagagcagatcggcgatggccagggacaagaggtagtagttgatcacctctgtgggtcctgcgatgacagcaatatcgttagaaaacgaagtagaggtgtattcaaaaataataggcaaatgcaaacaataatatttaaatggatcattcaataatttgggcgagtctatttgtacgacattcactagaactatttagaaacctaaggttcttaaatttatccaataacaatcaatttataggataaaagtttaggtacaaaaaggggaaagaaataatatgcttaagcacaattggtttttgaattttttcaaagcaattaagacaacaagaaaacaacacatttgaatttttggggaggatgccgtgttacttcattcctttcactttcacatcaaaatcatggatgcattttaagtataaacattggacttaagtggtcaaaataaattatattcaacacatatgtaggttacttatgaaaatattatgcttgaggccaaacccaaccgcgagattcgagatgttcctgtggaaagtgttatgtgagtgtgatattcgtgcaacgtacccttgaagttggcataggtggcgataatgaggaggttggacaggacgatggccacgcccagtatcgatatgagcaccgccttggtgagggcctccaccttggaattatcctgtaggtagctcatttcctgcatttttacgggctggcactgtcggttgaaatgggcgctcctgtgctcgttgtatacgctcccttagctccttgtccgtttccctcctccttggctcctcctgctttcacctgctttcgctgctgctttcacccgctttctccgcaccttcttggcgggctgattgttatgcaaaggccagtggacgtggacgtgaccgtactttacttccggtcatggcggacgcccatgcaattgtcctgtgccttcggttgtgtgtgtcggtgtgtctgtgagtgtctatgtgtgcttaggtgagtgtgtcgatgtgtgagtgtgtgtgtgtgtctgggtgcgagtgttggtggcgtcctttattgtgcaacgaggcttgcacacgcgaaggtcgtcggagtccttggcgctgttttttcgtcctttctccaacgttggcgccaaatttgtataaattttctactgcctacttttatttgggctgcaacttctactactgcccaccttttggcgccgagccaagcatttgattgttaccctcacaatcctggcgtcgtggttaaggttaaggataaggttgtgctggtgtgtgtgtgtctatgtgtgtgtctgaagctcgtttaaaatgctgcttgggctaaaatcttacacgtaaaatctagtaattgcgtacaatttggtttctatcttagaggatcgttaatgatttaaagaattcgttttgttttgctaaattcacaacgctctttgctaagttttaatgaacgtcaaaactgttagttgtatgcttgaataattcgctactagttttaatatcgatttaaaaatgtacacatttcaaactcgcaagtggaagaataatgattattaatttaactatttaatgtgtaataattacgcggttttcagggctctttttctttcggggttagttgaaatatctttcgactataattaaagcacagcacaaatggttttgttgttttgtaaggcttctgttgtgctacatttaagtttgttaaaatagttcgataatagttcggttgttaagtatcggttttgctatttaatttcgctgcttggtgattgtgattatccttttgcttgtaaattctggctcttgttgctgttgttggtgtttaaactccacgtcctgctgtcgttttaagctaattgtgcgcatctgaaaggacaaaggatagcaattgtatgcctttagcgcttcataaatagtttacagaatcttccatcttgagccaatcaataaattatcccacatacggcagcaggcggaaaaagccttttagctgcacaaacgctttaca

SEQ ID NO: 140 - DNA, 1584 bp, Drosophila
acacactcacacatcgacacactcacctaagcacacatagacactcacagacacaccgacacacacaaccgaaggcacaggacaattgcatgggcgtccgccatgaccggaagtaaagtacggtcacgtccacgtccactggcctttgcataacaatcagcccgccaagaaggtgcggagaaagcgggtgaaagcagcagcgaaagcaggtgaaagcaggaggagccaaggaggagggaaacggacaaggagctaagggagcgtatacaacgagcacaggagcgcccatttcaaccgacagtgccagcccgtaaaaatgcaggaaatgagctacctacaggataattccaaggtggaggccctcaccaaggcggtgctcatatcgatactgggcgtggccatcgtcctgtccaacctcctcattatcgccacctatgccaacttcaagggacccacagaggtgatcaactactacctcttgtccctggccatcgccgatctgctctgcggactcctggtggtgcccttctccgtgtatcccgctttgaccggagaatggatgtacggcgacatcgtgtgtcgcttcaccggctatctggaggtcactctgtgggcggtatcggtatacaccttcatgtggatatcagtggatcgctatcttgcggtgcggaagccactcagatatgaaacggtgcagacgaaaacgagatgccaatgctggatggtgttcacttggatatcggcggccctgctgtgctgtcccccaatcctgggctactcgatgcccatcgagaacaacatgacgcacatttgcatgctggactgggggaatatggcagcatatagcgccaccttggcgatattagtcttaggtcccagcctcatttcaatcgtacacaactacggctatatctttgtaatgatgcgtaagattaggtccggcgagccgatacacgataaagaatatgcaactgctctggctgaaaatttatcgaaccctagtcatatgatgtcattcgcattagtctttgcattctgggtgtcctggctgccatggattctgttgcgtctgtacgaggtggtcacgggcgatgttatccaaagtactcttatcaacttcgccgtcgtctggatcggcatattgaattcgttttggaaaattctgatcatgaccagtatgtcgccgcaattccgtatcgctttgagagtattttgcttaaccatttgttgtaagactaagggccgtttgcaagcagagctaatcgggttggacccagatgactagagttagatttagattttcattctcctcaaaaaaaaatacaataattatccgtaaaaatccccctcccaaacccatcctccgtaatccctttgagaagaactacaaagtcctgcaagtaaataattggttgtaattgcattgagccatttccttaactctctatatatctctctctctcaatatatataaacacttacttgcctgtttgccatatagttgcatatttacgggccgtttggcgctacgcgacatgccaatgaaagcaccaccccacagtcacagccacagaaaaactgaaa

SEQ ID NO: 141 - protein, 322 aa, Drosophila
MQEMSYLQDNSKVEALTKAVLISILGVAIVLSNLLIIATYANFKGPTEVINYYLLSLAIADLLCGLLVVPFSVYPALTGEWMYGDIVCRFTGYLEVTLWAVSVYTFMWISVDRYLAVRKPLRYETVQTKTRCQCWMVFTWISAALLCCPPILGYSMPIENNMTHICMLDWGNMAAYSATLAILVLGPSLISIVHNYGYIFVMMRKIRSGEPIHDKEYATALAENLSNPSHMMSFALVFAFWVSWLPWILLRLYEVVTGDVIQSTLINFAVVWIGILNSFWKILIMTSMSPQFRIALRVFCLTICCKTKGRLQAELIGLDPDD

SEQ ID NO: 142 - DNA, 4900 bp, Drosophila
taaatatgcatattgaacgaggcaatgcaatgcgattgaggtccggctgtgcgtttcagttgcgaaatgagttgcgaacaggatttatattcagatttagccattagccaaatgcaacaccttcgacgacgtgtggacacgtcgactttgattcggccaactgagtgatccggggtagtagtgtcagatgccaacattacttatgcactgaaagaaataaataaaggatttacatgtgtagtaatgtataattgggctgcatgacatgcatgataatgatcaactttcaagcaataataattctatgacatcacgacattcatacggacagaaagacgaacatggatttaccattaaaatgtaattataatataatataataaagtatctaaagaattttttacttggatctcctagcaattttaaccatattctcaaatgcaaaatgtgaagttcttgcaaatagatacacagactaatgggtccgcatttgccaattaattgcctacaacgcccaggttgctttgaatcacaggtggacatttggacaggtttgctcagctcactggcagctccactttggccattcaaaattgtttatcgctttgacgagttgcagtagcaatttcgacaccgtatgcccataatgaagaaacggcattgataataacaaagtaatgataaattagatgctgttgacgtctaattcatttttgatgatagtattgattttatacataaatgacacaatttcccttttattttgtaaaacattatggcattttcactttaatggtcctgtaaaacacaagttagttgtaaagcacagaaaaactttccatttcgatgacaagaagtcctttaaaattcaaataaatatataattctaattctaaataaataattctaagcaatggtttatgtatttaaactccttaaattttgttccagtttttaactagcacatatacatcaaaagagcggaactagatagtctacaatgatgcaagagaccggcaatcaaatgggacagacccatatgcaccagcgggttcctttcaacgacacggttctgaaggactatcatctcacgagcaccgatatcgagaagtttgtaaagctatggcaggagtaccagatgaagaacatgacccctcaggtggatgagtgccagggctattgccagggggaaatatacaactggttgcgagcctacaacagcatccatggatacgtttcgctgatggtaagtaatactcgtgattacaactccccctgggcacgaaacccgcaatgttggccaaaacaaaggaatcggttgactaatgatgagcaagggaagccaagacgatacacacagaccttcgccgacagaccactgatgaatgtaggggacttctttacctttgaactcttgccaaagtcgtccttttttcgaattaaagttatagcatgcgctcagcttaaccatcaaaatcacaaatgaaattagtggccgggaatctcggtcttttgtttatgtccgggtttcccttttcagggcttttttgaaaaggatataaattatattagatgtagttaagccgttgaggcgttaatgtgcttttttcattataattttcagtcgtaagtcattttgcgttgtagcagacggcctttaccacaggaattgggtcagaaaataccgagaatccatttccatcaaggctagttcatagcccatcttttcaaataaatatacaataaatcaaatacagttgaaaaatgtaactttattgctttccttcgttcgcacaaaaaatagtttacctcttaaattgaaataaaattctgaaccaaacttcggttactgtagttccatttttttttttttttgcttgtgtgagcaatgttaagaaatgtaaatacgagaggtcacgacagttgagttgctgctcacgagctgaataaataaaatattcatccactttggtgtccaaggggagtgcattcagttgaaagtatgtgagcgctcacagtttcgatttgacaaaggacgcattttatgttgattctttcttgtttctttaaatcacctagatttgcattttcgggacaatagcaaacatcttgaacataatggtcctgaccagaaaggaaatggccaagacgcccataaataatatacttaagtggctggcggtggccgatatgtttgtgatgctggaatatataccctatacatcgtatcagtatatatatatggggccaggtaagcatacatttagtaataatatttaataatagtcttggttatagctttacttgttatttatttattagtgttatcagctagattattattataaaggtatactcttgatcaggatctacacacgtctgtctgtccgtttctaagggtatattttgttaacaattttgttaacaattcccatatatcctttcccctttgcacttacttttagttgagtaacgagtatgtggtagtcgaggcaatcggctatgaccttctctgtaggtttcctttcttttttaattttaagccgtttaaatttttttgaattatttaatattctttgtatggctgttgcaggtgaaaaagatttgagctacacctgggcggtttgtctgctggttcacatgcacttcacccagatcctgcatacgatttccatcggattgactgtcacgctggcggtgtggcggtatgtggctatcaggtgagatgatccttcggccagctatgcatgacttattccggaattcgccgtcatccatgtagagtttgtctccggttcacattcatgataatccacatccgcaattcgaacagacatccggctaatctgattaccacatcattgtggcaatgtggcttctcttctcttcccccgtcttttgtttatagccaaatgttaccgtctctattccacagacatccgaacgggggctgtgccaatttcctgctagcacattcccgggaggcgatcctcctgcccttcatcctgtcgccgatcctctgcctgcccacgtactttgtgttccaggtgcgtgagacgtacgacgtggacaaggtcaactcggaggccatgtatcatgtttatttcgacaaggactcggtgctctacaggtgcgcttagataagaagtctgatgtcatttatgcatcctgcgaagaaccaattgtaaaatatttcatcgtgaaaatccttaacagattcaacttctggatacattccgtgctcatcaaacttctgccgtgcggcatattaattgtgatcagtgcagtacttatgcacgttttgtgcgaggcatcgagacgtcgcttgaagctgagggattacaacaatcccgccaaatatgccatccagcttaatctgaatgaaaccaaatccaagaagtaagtacgcacttgactcgtttagtgcttaagaattcgcctcatttgcagtttgccttgttagtttcatgatctttgatttttctgtttttgaatggtctcggattttgtcaaatctcttcttaggttcctttttgccatcttttttataaatttgtctttttgtttttgtatcttaggccgcctcgctgtgatcgccgtaacgatcggactacccttttgctggttgcggtactggttttgtttctgatcacggagtttccgcagggattacttggtctgctgtccggagtgatggagaagtgcttcttcgcccactgctatccgccgtttggagagctgatggatctgctggcactgatcaacgccgccgtcggattcgtgctgtacggtctgatgtcgaaacagttccggaccaccttccgatcgctgttcatgaagcggcactttggcagcaccgaaatgaccagattgacccgcgtaaccacgacttgcgtctagttgggcacatctaaagatgtgatcatgggcaggagcaaacactagtgagggatgaagtaggtgagggacatccaagatgttccggcccggcattgaatttgaattttctaaagcataaactttataaaagtttcgttgactaaacaaagcctaaatatgagaaactgtgagtgtggaattattgtacgggctgaccagttgatcagttgatttccacaatggtttacttttaggtgtagtcctaaggcgttgactggtgcatcgatcggtttagaaattgattctgcttgtgatctggctgtttcgcaaagtgccatttcatttccaaataattacattgattagtttaccagttggtgtttcaaattcgtattagtatataagtttcataggctaagtcagctgtacaaagctgtacaaatacgagacatttacttttccataagatgcagaaaaaaaaacaggaatccatcatcagcaaaactgtagccatgctaagaggactgaagaactcactgagccccgagttgctctctcttcttagctggaatcacgaaagaattctattttgattgtatggcgttaactggttttcaacaaagtgccaatgcattttaaattggctaattgaataaccatattttgagtactttttaagtcgcttatactatttataaataaatgtgaacactttcaaaaaaaatatgtttgatgtgagttgcatacaaatgaaacgtttattgctttccattaccgaaaaatgaacatctaattctgactgacaacagcattcacctccagtggcaattcgtccggcagaagttccgtggcccgattgtgtcccaaatcagactcgcccatatccgcggaatccagcaggatgccattgccctgattcgagatgcgcagcagggatttcagcttggtggcttggaatttgtactgcaggataatgagattgataaaatctgctctcgagggagtttcgaccataatgtaa

SEQ ID NO: 143 - DNA, 1245 bp, Drosophila
atgatgcaagagaccggcaatcaaatgggacagacccatatgcaccagcgggttcctttcaacgacacggttctgaaggactatcatctcacgagcaccgatatcgagaagtttgtaaagctatggcaggagtaccagatgaagaacatgacccctcaggtggatgagtgccagggctattgccagggggaaatatacaactggttgcgagcctacaacagcatccatggatacgtttcgctgatgatttgcattttcgggacaatagcaaacatcttgaacataatggtcctgaccagaaaggaaatggccaagacgcccataaataatatacttaagtggctggcggtggccgatatgtttgtgatgctggaatatataccctatacatcgtatcagtatatatatatggggccaggtgaaaaagatttgagctacacctgggcggtttgtctgctggttcacatgcacttcacccagatcctgcatacgatttccatcggattgactgtcacgctggcggtgtggcggtatgtggctatcagacatccgaacgggggctgtgccaatttcctgctagcacattcccgggaggcgatcctcctgcccttcatcctgtcgccgatcctctgcctgcccacgtactttgtgttccaggtgcgtgagacgtacgacgtggacaaggtcaactcggaggccatgtatcatgtttatttcgacaaggactcggtgctctacagattcaacttctggatacattccgtgctcatcaaacttctgccgtgcggcatattaattgtgatcagtgcagtacttatgcacgttttgtgcgaggcatcgagacgtcgcttgaagctgagggattacaacaatcccgccaaatatgccatccagcttaatctgaatgaaaccaaatccaagaagccgcctcgctgtgatcgccgtaacgatcggactacccttttgctggttgcggtactggttttgtttctgatcacggagtttccgcagggattacttggtctgctgtccggagtgatggagaagtgcttcttcgcccactgctatccgccgtttggagagctgatggatctgctggcactgatcaacgccgccgtcggattcgtgctgtacggtctgatgtcgaaacagttccggaccaccttccgatcgctgttcatgaagcggcactttggcagcaccgaaatgaccagattgacccgcgtaaccacgacttgcgtctag

SEQ ID NO: 144 - protein, 414 aa, Drosophila
MMQETGNQMGQTHMHQRVPFNDTVLKDYHLTSTDIEKFVKLWQEYQMKNMTPQVDECQGYCQGEIYNWLRAYNSIHGYVSLMICIFGTIANILNIMVLTRKEMAKTPINNILKWLAVADMFVMLEYIPYTSYQYIYMGPGEKDLSYTWAVCLLVHMHFTQILHTISIGLTVTLAVWRYVAIRHPNGGCANFLLAHSREAILLPFILSPILCLPTYFVFQVRETYDVDKVNSEAMYHVYFDKDSVLYRFNFWIHSVLIKLLPCGILIVISAVLMHVLCEASRRRLKLRDYNNPAKYAIQLNLNETKSKKPPRCDRRNDRTTLLLVAVLVLFLITEFPQGLLGLLSGVMEKCFFAHCYPPFGELMDLLALINAAVGFVLYGLMSKQFRTTFRSLFMKRHFGSTEMTRLTRVTTTCV

SEQ ID NO: 145 - DNA, 4116 bp, Drosophila
gttaaatgatttacaaacaagccgacatctcgggaaccattaaagagacatttaaagtcaaaaagtggccaactgaaacccgttaaaatccgcttgcgaccgcaacttggcccgactaaggcaaaaaataacataatcctgtcaagtcatgcagacagggcgatttacattataattttaaatggcaatggattagtcatcatcagtacctgcttatctggttttcctgatttttaaatcaaatctgtgactgtatctcttacctttcctcttgtacctcgttattataaaatgcgaaaaccctctgccaaaggacactataaaacgaattttttaaaagacgccaaacaaaatggcactttttgttgagaagaaaatatgccgataagaacgttttacttgtaagacgctgcagaaagattaggaacgaaaactatcgacaatgtttacttgtataatctgagctttctaaaacacaaaaatagtgtacttttaccatacgcttaatttcgaaattaatccgggatatacagttggggatccagattttaaattcgtgaacacagctgctggagtagggcatttcctgatcgatctgttagttttcggacttttactttggttgttgtaaacaatatccgcaagtttctcgcaaagtgggttgcgttgtgccgtgcctcagtagagcactacacactaccttcgattgagttcgctgggatttggatttcgttcacagtccaagtttggaccgtgctaggagaagataatgatccgatcactcaattaacttcatgcacccagtgacgtcatcagtgctttactattcggtgtctatatagtctattttgtttaatttcttacaccctacatttcgatacgattcgattttcgtttggaaattgtctgaaggtaaacaagcataaattggacgttcaagcgtaaacaaatcggttttcggagcaaaatacaaaaatcgtcagttgagaaagtctctcaaatggcgcagttctgcattcttggagtcctcctcattctttctggaacacactgctcgtggggattccatgaagagacacattatccgtgtgcctttatcgatacggcaaacataacggggagctacggcttagatggcccatttgtgcacaactggacggtgattccccgtcacttcgtagccgtgtacgactttgtcatcgaaaatggcatccgcatccccgcaagcaggcatctcagagcctgtgtctgtaagaccaaaccctgtgtacggatttgctgtttacggggagaaatctacgacctggagaagaggcagtgcttagtccctgtggccggggtgtccagccttccctcccatagccatatggaggtggagttgggcaacggcagtctgcgtctagtgaaactgcaaccccgttttagcatccacgtggaaacaccatgtgagcacatgaaagccgtaaccaagggctcggaatacgttcactggacacttcatgaggtcggttgtgaaataaaccttccatcacattaatggctttacatcgccttttcagaacggaaccatcagccaccgaggacacatattttctaagcattactgcttcactccgctgctccatgggaactccacctgggagtggcagccattggcctgtgcaccagaaaaactatatttcgtcttgggggtgcgggagtggacatacgccatatgtaagtagcaagaggaaacatttttccagcaactttcagcaattcattatcccaaatatgcacaatactgttttcacaacaatacataaaagtaattgctaaagcaccaaaaaacaatcgatgatagcattaatagtttgatagtcagaatttaatttacccagcgtattcactttccaggtctcttgatagctattctatcaatgtttatcgtgctgatggtctaccttatgtgttcggaaatgcgcaacagtttctacggtgtggccataaaggcgtacgccatttgtatgatcttgggatatgccctactggcttatctcacgctccacaacccagcaaatctctcaaatgcggcttgtcgtattctacgtaagtggtaaatttgagtattctgtgatatttaaacattcccttcttttttttttttagcaagtttggcgttgatgaacttggtgctttccttttacattctgagctttattgcatttaagctgtacttgagcttttatggcgttgtcttcacaaaactgatgttttggctaatatttactcccatcgtactggtagccgtgggctggtctttctttgtgggtttcagttattacggctctaggctcatcttcggaggcgatacatgctggtttgatcgtaagcactgccaatccatatatgttttataataattaattggtattccacatcgctagcacgcaattggtccgttatgatatatttttacgctcctgttttcgtggcttgcgccattagcggtttcttctatgtcctgagccagatctacatccgtgatcagccagatatcgagacggagaagagcttcgagtccatagagaagaaccgattcaaatcattttggaagtactttggctacacggcagtcgtatgggtcgtttgcatatgctcctttgcctttaactactactgggagaacagatcccaccttaactacgctgtaagcttctgcatggccttccacgggtttgcggccctctatgcgctgattggaaagaatcagcaaatccaaaattttctgcggcgcatagataagtaagttgataactatgaattttaagtactactgttaatatatactgttgcagtggcgaagatacctgtgaaaactcagttccgctctcgagttttggttaacttttcttgttgtgcccactgtagcgttagtgtaactggaagcagttgagtgtatcgacaatatctgtgcaatgtttttaaaatcacttatcagcatagacaaaaaccatgtattttaaatgtaaaattttgtaggatgtgtgtaaaatatatttgtaaaatttgaactcgaacaaaaaagtacacttctaccctttaaacgaaattacgataataaagatacaaaaaataaatatatctgaaaaaaaaatcaggtctggaatttctacaattgttaaatatgataacaagtcccaacaatcctttcagtatagaacaaaacatggaatatacttaagccatgtgaaagaacacataacatattaatattctaaacaatttgagcagttttcttgagtttacgcctccaacaatttatccttcacctttcttgagttccaaattcctggaccgtgatcaagtttctccagtcttatttcaagtcccgattttactgtaccctatccgcatcgccaagcccggtgttacttccccgatctctctatattataaatgtgcgccgattttatttaacatcagaggtcaatggccgcaaaacagacagagagagagagagagaaagttggtcagagccacgagaactgcatcccgacagggggctgtcaagagcaaggaatcaagtggaatgttggtggtgctcttttgaaaaggcttcgcaaactttccccctgtacacccccttgccaaggcctaatcgcagaaaacccacccgggtcggagtccccaattcattttcatgccgattatgcttcgggttttggtcctgctctttttggctgggcgtacagcagcaggactcggggtacacactaagagaggtctaagaatatagagatagacaaggaaagcagatggatcgataaaacgtagtaaaaatgctcgtagtaatggaagctggaaataacatggcacaaacaggccccaaactgcatcgacaacaccatcacaatccagacgtgcgcactggaaaatcccgagaggtaggacatgtttggcgcgtttttcgactgcatgtgtgcgagtgttctgttttggttagatacgtatgaaaaagtgaaaaagcctatattgaccgcgcccggtagatcgcataggcaatatcgatatgggaaatcattgactaacatttgcagacatttagtttgggacacattaaagttaatttgactc

SEQ ID NO: 146 - DNA, 1709 bp, Drosophila
atggcgcagttctgcattcttggagtcctcctcattctttctggaacacactgctcgtggggattccatgaagagacacattatccgtgtgcctttatcgatacggcaaacataacggggagctacggcttagatggcccatttgtgcacaactggacggtgattccccgtcacttcgtagccgtgtacgactttgtcatcgaaaatggcatccgcatccccgcaagcaggcatctcagagcctgtgtctgtaagaccaaaccctgtgtacggatttgctgtttacggggagaaatctacgacctggagaagaggcagtgcttagtccctgtggccggggtgtccagccttccctcccatagccatatggaggtggagttgggcaacggcagtctgcgtctagtgaaactgcaaccccgttttagcatccacgtggaaacaccatgtgagcacatgaaagccgtaaccaagggctcggaatacgttcactggacacttcatgagaacggaaccatcagccaccgaggacacatattttctaagcattactgcttcactccgctgctccatgggaactccacctgggagtggcagccattggcctgtgcaccagaaaaactatatttcgtcttgggggtgcgggagtggacatacgccatatgtctcttgatagctattctatcaatgtttatcgtgctgatggtctaccttatgtgttcggaaatgcgcaacagtttctacggtgtggccataaaggcgtacgccatttgtatgatcttgggatatgccctactggcttatctcacgctccacaacccagcaaatctctcaaatgcggcttgtcgtattctaccaagtttggcgttgatgaacttggtgctttccttttacattctgagctttattgcatttaagctgtacttgagcttttatggcgttgtcttcacaaaactgatgttttggctaatatttactcccatcgtactggtagccgtgggctggtctttctttgtgggtttcagttattacggctctaggctcatcttcggaggcgatacatgctggtttgatccacgcaattggtccgttatgatatatttttacgctcctgttttcgtggcttgcgccattagcggtttcttctatgtcctgagccagatctacatccgtgatcagccagatatcgagacggagaagagcttcgagtccatagagaagaaccgattcaaatcattttggaagtactttggctacacggcagtcgtatgggtcgtttgcatatgctcctttgcctttaactactactgggagaacagatcccaccttaactacgctgtaagcttctgcatggccttccacgggtttgcggccctctatgcgctgattggaaagaatcagcaaatccaaaattttctgcggcgcatagataatggcgaagatacctgtgaaaactcagttccgctctcgagttttggttaacttttcttgttgtgcccactgtagcgttagtgtaactggaagcagttgagtgtatcgacaatatctgtgcaatgtttttaaaatcacttatcagcatagacaaaaaccatgtattttaaatgtaaaattttgtaggatgtgtgtaaaatatatttgtaaaatttgaactcgaacaaaaaagtacacttctaccctttaaacgaaattacgataataaagatacaaaaaat

SEQ ID NO: 147 - protein, 492 aa, Drosophila
MAQFCILGVLLILSGTHCSWGFHEETHYPCAFIDTANITGSYGLDGPFVHNWTVIPRHFVAVYDFVIENGIRIPASRHLRACVCKTKPCVRICCLRGEIYDLEKRQCLVPVAGVSSLPSHSHMEVELGNGSLRLVKLQPRFSIHVETPCEHMKAVTKGSEYVHWTLHENGTISHRGHIFSKHYCFTPLLHGNSTWEWQPLACAPEKLYFVLGVREWTYAICLLIAILSMFIVLMVYLMCSEMRNSFYGVAIKAYAICMILGYALLAYLTLHNPANLSNAACRILPSLALMNLVLSFYILSFIAFKLYLSFYGVVFTKLMFWLIFTPIVLVAVGWSFFVGFSYYGSRLIFGGDTCWFDPRNWSVMIYFYAPVFVACAISGFFYVLSQIYIRDQPDIETEKSFESIEKNRFKSFWKYFGYTAVVWVVCICSFAFNYYWENRSHLNYAVSFCMAFHGFAALYALIGKNQQIQNFLRRIDNGEDTCENSVPLSSFG

SEQ ID NO: 148 - DNA, 3772 bp, Drosophila
agtcagtgcctggacggatcgcacgagtccttctactaagcgctaccagtggtggtcgtaatcccccaatccaaacccatacccaaagcttcgctgcattttcgaatacaaacactgaactatccgtcgttgtaaagctaccttatccactacgattactacactatcctacaaaaaactatgctggttaaaagactatacacctagctccatatactatatatatatatacaatatcgaggcatgtgttgtgtgggcgagtgagtgtgtgcgtgtgacttctgattgagttgccatttgattccaagtattttcgagtgcttagttttgtaatttgtagctagccgttaatgtttgtataaactgtttcattggtttcccactccgctttattcgataagctcgttttctagattttagctttagcactcttagtttaatgtttaaagttagtttcgctgttaagtttacaccgtagtcgaggcgtcttgagtagttcttttgtacattaagcttacacttagctctacattagatataccatgtcgaacctacgagtctacgaacatacgaacatatatatgtgcgttgaaagcgttgtattttttgaagccgaacttatgcaaccgaaaggagacaataaacaaatgtgctataaaggacgaaagtgtcgcaaataaatgtgagccactgctaaagaagaccgatttgcgcaaggtgttttactcggcggcggcggcaagaagcgtttggggcacaaacgacggatgagtgattgccactcgtaccatcatcatgacgatggcgtgtggaacgacgtgcgcatagtaatgacagcggatggcaatctgaacgataagcggcacccgataatgaaacattaaactaaaccgtcggtagtcgctggccataaatctgtcggcagtctgctcgcagaagcttttaggtgcggaccccttgcgcggcatactttcgggcttccgttccgttccgttcgccaatggccctgctccactacaccttcgaccagctcgagttgtacctagaatgggcgttcgcccagcacggagaggccacgccgattccctcgatccagccgtatccgggcgtgttcgtgggcgatctcagccagctgaaccgcttcaagcgacatgccttctccgccgtcgtgggcacgctcttcgtcctcgccttctgcggcaacctgagcaccctctatgtgaacagccgccggaagctgcggcccttcttccgggcctgcctcatctcactggcctgcagtgaccttgtctccagcatattctgcaccgtatcctacatggcccagttccaggcgcagtatctgcagctctgggtgaggcggcagggattgagcagactcaacacaagctaattacaaatctccttagacaattggtggcttcatgtgcaagtttgtgccgttcataaccaccacgtcggtgttgtccggcagcctgaccctggtggccatcgccttggaccgctacttggccgtgatgcgacccgtgctggggttctggagtcccgacaaacgcttcagcactctgagcatgctgctcatctgggcatgttcgataggatcctctggcccgctgctgggcatctacgactaccgaaagatctatctcctggatgtggaggactccagcgaggagagcgaggaggtcgtgaccgctgtgcccgaggagctggtggtcaccgagctggaaatggttcacatgtgcctggccggggacgtaagtcaacgactggattatcgcttaatacagttgacagcgattaaggggatttggacggggggatgtcaagttgttgaatcaatgttccgattatcttatcagccgcgtcgaaaacaatttatgcaattctataaatattccgttttagcacgacgtcggactctactacgtcatactgttcaccctgatcttcctgccgtgcattgtgtccttcctatggctgaatgccgtgattgcgaggcagctctggctgcggagacactaccaccaggagcagcaggagcagcatcaggagcccaaggagggtcagtttaagaccatggcgaatggcggggatctcttgatgccctccaccttggtcagtgccatgggagtggccgttccctttgcgctggacaacactcccttgccgcccaagagtaccgtcaacgctcctggcaagaagaccactgctgctgctctagccagggaggccaggcaccgcaagatggtggtggtggtgctgctaatgatggcggttttcatatgccttcgactgcccgcctgggtcttcctgatcatgcggctttatggatcctactccgagcccatcgactggctcctgtacttcagcttcggcatactgaaccttttcagttgcgccctaaatcccatcttctacaccttcctcacccagaccattaggaccttgacgctggtgaaacacaaaattcagggatttcttggctgtccgcctggtaaagtgccggatggtatgcccacggatcagatggacaaaagcgggtgctgctgcggcctgaggccacccaccttcacatggaggtgccatcccagccgcgatagggcagcagccaccgtaatccgggatgtggaccagccagatccgccctccgaccaggtgcaaccggatccgagtagcctacggcggttcctcagctacaagcaggaggtgttcaccatttacaagcagtgcggtgactcgtcgagtgcgtcaatcgagtcctccgcctgataggcggtggtcataaatcacccgggtgcatttgtcggatacgggggccaacggttagcagaaccccagaacttgattgatggatggatccagcccccattcactctgtacaggcgcaaaaacggtttgtcacggtgggtatatcacccacgaatacactagcacgcatataagatataagctcacatattatgtacctcatcaaatgtgtaaatatgaggaataaacgaatgggtgttggcagctaactaaccattaacacatggcgcaatcgaaatcgggaaggtctcagctattattgtgacgaaaacctaagacctttcaagtaccacttaaaactatatttagagaacttaagcaaattgtgagattaaaatgcaatgcaactcctaaaggtgcgaatatacctattcttaaatatttttactctagaaatactgacatctttatgtgcttagttttcgttcagacagactatctttgttatttctaagaacgtagtaattagttaatggaattaattagtaaccgaaacttaaaattgagtcatgccaaaaaaagagaattggcctgacaagacacacattatagagtcagcagatcgtggacgagacaatgagcccgcaatgcaatggaactagattgtatcatatactagatacttccgcttggaacaatggttaacagatctcgtgagagatggggctgaaagcagttgttaattgtcaaatgttgagcacgccagttaaatttagctatgcagcgaaagctctctcccatactctcttcccatgaacttttttaagccgcagagcccgaagctcgactcaaagctgaattctgcgttttctggcattcagtgtcggcggtttgcggcgagcggttggattcggattctttggtcggtaaaacgcgaaatcttctgtgcggcgggtgaaatcttcggcagaagaaacaacaaagcgacaagtgtggagtgtggagtgcataccgtaccacg

SEQ ID NO: 149 - DNA, 1566 bp, Drosophila
atggccctgctccactacaccttcgaccagctcgagttgtacctagaatgggcgttcgcccagcacggagaggccacgccgattccctcgatccagccgtatccgggcgtgttcgtgggcgatctcagccagctgaaccgcttcaagcgacatgccttctccgccgtcgtgggcacgctcttcgtcctcgccttctgcggcaacctgagcaccctctatgtgaacagccgccggaagctgcggcccttcttccgggcctgcctcatctcactggcctgcagtgaccttgtctccagcatattctgcaccgtatcctacatggcccagttccaggcgcagtatctgcagctctggacaattggtggcttcatgtgcaagtttgtgccgttcataaccaccacgtcggtgttgtccggcagcctgaccctggtggccatcgccttggaccgctacttggccgtgatgcgacccgtgctggggttctggagtcccgacaaacgcttcagcactctgagcatgctgctcatctgggcatgttcgataggatcctctggcccgctgctgggcatctacgactaccgaaagatctatctcctggatgtggaggactccagcgaggagagcgaggaggtcgtgaccgctgtgcccgaggagctggtggtcaccgagctggaaatggttcacatgtgcctggccggggaccacgacgtcggactctactacgtcatactgttcaccctgatcttcctgccgtgcattgtgtccttcctatggctgaatgccgtgattgcgaggcagctctggctgcggagacactaccaccaggagcagcaggagcagcatcaggagcccaaggagggtcagtttaagaccatggcgaatggcggggatctcttgatgccctccaccttggtcagtgccatgggagtggccgttccctttgcgctggacaacactcccttgccgcccaagagtaccgtcaacgctcctggcaagaagaccactgctgctgctctagccagggaggccaggcaccgcaagatggtggtggtggtgctgctaatgatggcggttttcatatgccttcgactgcccgcctgggtcttcctgatcatgcggctttatggatcctactccgagcccatcgactggctcctgtacttcagcttcggcatactgaaccttttcagttgcgccctaaatcccatcttctacaccttcctcacccagaccattaggaccttgacgctggtgaaacacaaaattcagggatttcttggctgtccgcctggtaaagtgccggatggtatgcccacggatcagatggacaaaagcgggtgctgctgcggcctgaggccacccaccttcacatggaggtgccatcccagccgcgatagggcagcagccaccgtaatccgggatgtggaccagccagatccgccctccgaccaggtgcaaccggatccgagtagcctacggcggttcctcagctacaagcaggaggtgttcaccatttacaagcagtgcggtgactcgtcgagtgcgtcaatcgagtcctccgcctga

SEQ ID NO: 150 - protein, 521 aa, Drosophila
MALLHYTFDQLELYLEWAFAQHGEATPIPSIQPYPGVFVGDLSQLNRFKRHAFSAVVGTLFVLAFCGNLSTLYVNSRRKLRPFFRACLISLACSDLVSSIFCTVSYMAQFQAQYLQLWTIGGFMCKFVPFITTTSVLSGSLTLVAIALDRYLAVMRPVLGFWSPDKRFSTLSMLLIWACSIGSSGPLLGIYDYRKIYLLDVEDSSEESEEVVTAVPEELVVTELEMVHMCLAGDHDVGLYYVILFTLIFLPCIVSFLWLNAVIARQLWLRRHYHQEQQEQHQEPKEGQFKTMANGGDLLMPSTLVSAMGVAVPFALDNTPLPPKSTVNAPGKKTTAAALAREARHRKMVVVVLLMMAVFICLRLPAWVFLIMRLYGSYSEPIDWLLYFSFGILNLFSCALNPIFYTFLTQTIRTLTLVKHKIQGFLGCPPGKVPDGMPTDQMDKSGCCCGLRPPTFTWRCHPSRDRAAATVIRDVDQPDPPSDQVQPDPSSLRRFLSYKQEVFTIYKQCGDSSSASIESSA

SEQ ID NO: 151 - DNA, 8599 bp, Drosophila
aggacacattggcgtacttagtctagaccactgggtgagcttaatgttttgccgttcggttatatatcatgcggtgatttgtggacttagcataaaacctaactgaacggcccggcgacatcccgactctctggcgactttggacgggccacgataaatcaaggcgcagatccgggagcccggcatatagtggatatagtatgcgtggcgaaacttaataagagatgcgacaacaaacaaatgatacagatagacagacggcaggcgacagtcgcggtggtgcgagaggtgggtaggtgggtaggtgggaaatgggattgtggaaagcggaaaaatctttaaagcaatgccgctgcacaggacatttttcaccgcgccatccattcgcagacggatcgccaaagagagacatcaacgtgactcgcggggagaacaagtgttttgatttatcgccagcaatggcaatggcagggcggacggggattgccatccaattatactgctaactttcattatgtcactgtgctatttcgggaccggattcgccgccatattggcccattgttgcgccattgtctatgcacagctctctgtttagcagtgacacactgcggtttcggtggcaggactcatctccatcctgccgcctgccttagtcgtcccttgccgcttcctcggtggactccgtctgataaatcgtcagcgcggcttccctttcacatgctttgacttcattatggcgtaacaaatcgtcggcattttgcattcctcgctgcggaaacggaagcggaagacatccccgaaagaaactgcgaactgggcctttgtggccacacgacgaattggtcacgcgccatatagacaattccatctcagttttccacatgttttgattgctcaacgttgtcaagggactttgtgctgctgtacttttttcgcttacactttaatagcttccgaagagactcatatccttcatatcctttcttgcagctctgccatggatctaaagactggctctctcctggtagcacccgccgtgaagaactccagctgctcgcatccgcgctactccggccacaatttcatcgcccacatagggattgcggagaccatcgaggcggtgctcatcctggtcctcacactgggcgtcatcggggccaactgcctggtcatcttcgtcatcaacaaccgccgctatgcggcctacatacaccaacaggtgggaggctgagtcactggcttaacaccttgtacatcttatgtctctccttgtagccccgttatctgctcacctcgctggccctgaatgacctgacaattggtctgctaattacaccattcggtctaatgccggcattgttccactgctggccatacggagagatcttctgtcagatacaggtgagcgggtcaagagtgggtcaacaccaggtcaacaagtggggcggaagtgcgataatttgttatggaacacccgtctcccgtttgcggctgttgccactgcggtcaattaactctctcttaacaatgcacagtaattactggacataaatggcggtgatggaaacggacaatcccgattaacgggcggaacaatgtgtaatgctagtattaacgtggtcgagagtgtgtaggattctgcggtaagagtcagggttccgatgcagaaggtgtgacaagcggaaagttatcccagccatatggttaggaagctagtgcacatggaaaaaccattgtgccattaattatcatgacggtggacagggggcatcgtggttagggtgtgcaacagaaactgttagtttatcacttatcaagtgtcaaaaagcatgcaacgaaatcacctagaatccatcacaacaattgttgcatacatgcttaaaaaggttgggtttttatgaaaatcagagttgtaaacattgtaataaaatccagttaacactcatacaactattttcatgggaaccagactcttgttatatattttatacgatgtcgtttcacaaaatttgaattttccaactgccactttagggttattggtaaaacatgcacgcattccacgcataactctcacaaatattgaaacacatactgacgattaataattttattaaaagtttttcgattcgcctcgacaagcgaaaaagtttgccgaaagcaataatacaaataataaacttctaaacgagcactaacgcattttctggctttttcgcgttttccaggccctgctccgaggggcgctttcccagcagagcgccgtcatcctggtttgcatggcagtcgatagatacatgtgtgccctgcatccgcgccgctactaccagcactccagcaagaaggtaagattccacgtcctatcgcctcgcatcgatagggaacttctattttgggttgcccggataaggcacgctcctcggcgatccttatcctgttgttcttgcactcgcgctcgcgctcggaaggacaataaacaaagctccggcataatgacgagaaatcacgcgccaataaaatcgactataacaatgggaagagcaccgcacagcaactacacaatatggtcggcgagccaattacgcaagcataaataaggataatgggctttaagcagcttgacagtcattaaacaggcaaaaaatgggtgggcagcgccaaagagcaagtgcaaaacaaagcatcatggagaatgaaaaagcaaagttggcaaaaaccaacaaaaccgaaaaaaaaaacaacgggggccaagtcgaatagacattcgaaaagtgtataaaatgtggataaaaaaaagggagcaaagttggcctagagattttttacgcgcaatgacttcggcacagggcgacgaccacagcaaagtccttttccaggacgcaggcaggcaaatgaagcggcacctcccacggaaaccgcagccaggaccaaagagcagcaaacgagctctcaaccaaccctatttcccattccccccttcgtaatttatggctcccggactgtaaacaaacgaaaactaggaggccaacagtcggctaagaacaccgaagtccgaatgtccttgtcccaaatgaacgggactgtttcagctgaaattggcgatcaataaatgtatagtttagaatccatttcccgcaaaattcaagctaacaaacagattttagcttacatatatgattatttaacctttttgatttacagtcttaatttctcgctgtttgcttggggattttgcaaacagttgtaattactaaactaactaaaaaaggaaaatgccatcaggccaaataaaacaattggaaaacgggaaagtaccaatagtggaaaataaatttacataacaattttgtatgctccgaaaatcggcgccatttcggttttttcatgccatctggacgagtgggcgaaattggcgcactgccacgccccatttgtaaaaatgatgggcgcagtgtcgaaaattaataaatggatgctgaatgcgaaatactggggatgctgaaaaaccaatgctcggcggaactcggtaatggtaattgggaacttttgactttcgtttttgcttactttcaaaagtgccataaattcaaagccagtcttggacatatctctttatttatagtgaatttaacagcttgactcaaaactcgtcttgttgttcgccactcacaatttgtattaaatgcacttgaaaattcaattattttgttatctaggatatttgctgactatccttacaacttcagcagtcgccgggttgtgctctacgaaaaactcctgcaatcctgcaaaaaaaaaaaataatatttacatttcaaaaattgtacccaactgtttgagatcgccctgctttgtttgtttcgttcgggaaaagttttaaatgtgatagcgtaaattaaattaatcacagccatggtccgtttcaaagagacacggacaaaagttgagcttcccttttttccatgactttttggcacttgggatggggccattttcattttttcaggtggacaggtggacaacattttcccattcaggatgtcagaatgctgcatttagtaactcagccagtcagtgcgattgtggcagcacttttccacttccaaagagcggaagtatcgctttccctctgtggtctgcaccctttaccaagtgattttggcataatcaaaagtttgtaattctatttttggcctcttggactcccttgttgaatgtcagacgaaatgtgcagtgaagcgagtggaattttagcaaattagaaagttgaagagggaatttccgacttatctgcacgccttagtgtgatataagccacttccggctaaataaacacttaatatgaattacccaaccttcattcattttcaattcagtattggccatattggcctgaaatgcagggaatacgtgcctgaagcccttcgccagtcataaatcagaccgcacctggcggaaatgtgctccactaattgtgtattcattttgcagggctgcgtggccatactgagcttaacctggattatcagcctgacggtgtttggctttctggtgctgcccaaaggtgagctgcccgagattggcccgacatcaatgtgctctcgaacacgtcaaaccataaactatatgcgcaggttactacttcaacaatacgggtctaatggcctgcgagcccttctacagcaagccatcctacaggatactgtccacgtgcgccctctactttcccacgacgatggtgctgatgtactgctacggctccagcttccacatgagccgcttccggctaaacgatccgaccatgcccctcacggcggccgcccaccacccccatccgcacccacatcccaccgccgcccagcagctgcagatgcaccagcaccagcaacatcaccagcaggcgggaatgcactcgcacctctaccacggccactcgcatcaccccagccaccccagtcacccaaaccaccccaaccaccacggccacccccaccatcatggaccgcccgttatgggccatctcagcatggccatgagcatgggactggccggcatgccgaacatgacaaacaagattaccaaaaaggtgagccagctgaaccgggtgaactgaggaagccaggtggcctgctggccaaaaggatgaagatggatgaaggaggatgaaagaggatgaagtgggcgggctccacaacagtttgctcaggcgggcgatttggggattaagttagcagtaaatagaattttctcggcatcgccaaacaaattgttgggtctatcagtatgcactcgcagaacttaaagaagtgttaacagcttttagtatttgtgaacgggctattcaatattggtaccagctaattcaattaaattccagaactcaggtaaactaaactaaaactcacttaaaaaagaactcgagttgtgcaagttactttacttactttccgtgcataaaaatatttccagaagccaatattacattttagcaaaatagaaagcagcagaagttgcatttgaaaatatatagaatactcaactatattgctaataaacaggaatagaaatttcgtttgggcagtatctacacataattgaatcaacaatagtcactttaattcaatcgccgcaaacattcccacagattgttcccatccaagagaagaactccagcggatccacctcgcgctcgatggccgccatttcactgggcttcatagtgatggtcactccgtggacgattcaggaaatagtcaccgcctgcacgggatccaaggcaagtgtcctgtacaaaggattattgtgtgaccgctttgtgctccgtacaacgcggcgcatacataatgaggtcacgcgtggctcatcagttttgattttgtgacatttaatgttctatgtccgtccacagctgccgccgttcctcgatttcctggtcacctggacggcgctgagcaatagtctgtggaacccgttcatgtactggctgctgaactccgatttccgccgcatgagtcgccagctgatgccgaacaaagtgagtatcgggtatccaacagtgggaagatgaatctcctcttctggcgctaatttactgcatctctgatctggagcgatgttcactgtccgtttcagcagcaaatctgccataagccctgattgattgattcgcttatccctattccaaacaccacgtgcacactttcattgacctccccgaacgccaatccccaagcccaaatatgggtatttcgcccaagtgcatcctgcagctcgcaaattttcctcctgcacagcgcaaagtttgcaaaaacaggagctacatcctcccgaaagcccccataaatccgtaaccgaaggtgtaagctccagaatgctggcagactgacccgggcaaagtaaacaatcaaccgacgcagcaacaacaatagcaggtcctgcaaagtgattttgaattatgaaagagcaaatctaagacggcatttacatcctcgtagccccacaaaccccatcccataggtcctgattccattttggtaaacgcagtcaagttgcatgatttacttccggagagccggggtcagtctgtggaatatttatggcccaaccttgtgctctgccagaataaatgcgcatttaaaatccttattaatttttgtgcgagtcggaatttatgatgcctccctgccgtttcagtgcttcccccacgaggatacgcccgagcacaaatcaggctgttgtcacatcaatgctaacgatttcgaaatcacaacgcttccgattcccccggagccgccatcatcccgtcctccgggcggagcaggaggaggaggtggaggtccatccagtggaggtcccagctctggcggcggagtggccagttccattggcggctccgtccttggaatctgcggccgctcgcgcacaaacagcctcagccgcagcgcctcccagtacatccgagggacaatgggcggaggagtccacaatcaccaggccacggaaaccttctccaccacgaggcctgacattgagggcctctccgagaagtactggggcgagatcctggagagaaccgtcagctcgggcaacctgaatgccatgcagaagcacctgccgccccacctgccctacgcccaccacctggtccaccagatccaccagccgcagcagcaccaccaacagcagaccacctccttcagcaaggccagcgatctgcagctgaacctgaacctcagccaagcagccacggctgccgagctgggcaagttctccaactcggagccgaagctgtgcgagcacctctttcacgacgtaaactgcgccaagagcaaggccgccaacggggatggggagtcctccggcaagctggcctgcggtcgcagcattccggacatctagtacgccgaggacgtgatcctggccaagaaccaactgctggccaggcaggccaagtgctcgcaccatccgctgcaccagcaggccaagacgcgtctccattcccacacgggcagcctgcgcttcagccggattcgcgctgcctgccacagtccgccgccggagaagtccgcctttccaatggccgagtatcgcaagtaggatcacagagggcactgggatcaaggatgccgggatacggtactccaggatgtccaggatatggtataaccatgcacagaatagggagtgagagcgagcgagtatctataagattccataggtgtatgtgcgtgtgagtgtctatataataccgcatgatcaaaccataatatgtgtgttttctattaggcttaagatctaggaggtcctttggttgggttttcaatttaaagtctctgagattcgcaaaatacccatggcctgtagaaagcgccctgaagcctaactaaaagaatatgaaagatagcacctatcctcagatattccactctttatataaagtaatctgtgttggttataacctgaatgattgctgtccatctgagaactttcaataccattagctagactttctttactatacatggatctggggaatcggaattagccgagttaagcagaagttaaccatagtaagtgttcattcaatgtttgtgataccctaagtttcccagcccaacatacatacctaccagtaacatataatataatcctagttgttgtgcgtgcgtcggctaaattaaacgtaggatatatggaaacagagatatcagactttcctatcagaacccgctcgacattcggaagcccttcgccaaattctccaccacttagggactaaggatctacgtagactctgatatcggcggaccttaaagcgttgtggttaatcatagttgtagttccatagctcgagtcgtatacaccaaattactcactgttcgacgaatcaaaatcaaatcctaactttgtgattgtcaagaatttaagtcggttgatgtggacattgctgttaaattaatttttatttgtagctaagtaattgactagttaaagccaaataaatttaccgtttaagtaagtctaactttagttaaataaacgagcggtgtgtaacaaatgtatttcataggcagaggattcaaatcgaaataaataa

SEQ ID NO: 152 - DNA, 2121 bp, Drosophila
atggatctaaagactggctctctcctggtagcacccgccgtgaagaactccagctgctcgcatccgcgctactccggccacaatttcatcgcccacatagggattgcggagaccatcgaggcggtgctcatcctggtcctcacactgggcgtcatcggggccaactgcctggtcatcttcgtcatcaacaaccgccgctatgcggcctacatacaccaacagccccgttatctgctcacctcgctggccctgaatgacctgacaattggtctgctaattacaccattcggtctaatgccggcattgttccactgctggccatacggagagatcttctgtcagatacaggccctgctccgaggggcgctttcccagcagagcgccgtcatcctggtttgcatggcagtcgatagatacatgtgtgccctgcatccgcgccgctactaccagcactccagcaagaagggctgcgtggccatactgagcttaacctggattatcagcctgacggtgtttggctttctggtgctgcccaaaggttactacttcaacaatacgggtctaatggcctgcgagcccttctacagcaagccatcctacaggatactgtccacgtgcgccctctactttcccacgacgatggtgctgatgtactgctacggctccagcttccacatgagccgcttccggctaaacgatccgaccatgcccctcacggcggccgcccaccacccccatccgcacccacatcccaccgccgcccagcagctgcagatgcaccagcaccagcaacatcaccagcaggcgggaatgcactcgcacctctaccacggccactcgcatcaccccagccaccccagtcacccaaaccaccccaaccaccacggccacccccaccatcatggaccgcccgttatgggccatctcagcatggccatgagcatgggactggccggcatgccgaacatgacaaacaagattaccaaaaaggtgagccagctgaaccggattgttcccatccaagagaagaactccagcggatccacctcgcgctcgatggccgccatttcactgggcttcatagtgatggtcactccgtggacgattcaggaaatagtcaccgcctgcacgggatccaaggcaagtgtcctgtacaaaggattattgtgtgaccgctttctgccgccgttcctcgatttcctggtcacctggacggcgctgagcaatagtctgtggaacccgttcatgtactggctgctgaactccgatttccgccgcatgagtcgccagctgatgccgaacaaatgcttcccccacgaggatacgcccgagcacaaatcaggctgttgtcacatcaatgctaacgatttcgaaatcacaacgcttccgattcccccggagccgccatcatcccgtcctccgggcggagcaggaggaggaggtggaggtccatccagtggaggtcccagctctggcggcggagtggccagttccattggcggctccgtccttggaatctgcggccgctcgcgcacaaacagcctcagccgcagcgcctcccagtacatccgagggacaatgggcggaggagtccacaatcaccaggccacggaaaccttctccaccacgaggcctgacattgagggcctctccgagaagtactggggcgagatcctggagagaaccgtcagctcgggcaacctgaatgccatgcagaagcacctgccgccccacctgccctacgcccaccacctggtccaccagatccaccagccgcagcagcaccaccaacagcagaccacctccttcagcaaggccagcgatctgcagctgaacctgaacctcagccaagcagccacggctgccgagctgggcaagttctccaactcggagccgaagctgtgcgagcacctctttcacgactacgccgaggacgtgatcctggccaagaaccaactgctggccaggcaggccaagtgctcgcaccatccgctgcaccagcaggccaagacgcgtctccattcccacacgggcagcctgcgcttcagccggattcgcgctgcctgccacagtccgccgccggagaagtccgcctttccaatggccgagtatcgcaagtag

SEQ ID NO: 153 - protein, 706 aa, Drosophila
MDLKTGSLLVAPAVKNSSCSHPRYSGHNFIAHIGIAETIEAVLILVLTLGVIGANCLVIFVINNRRYAAYIHQQPRYLLTSLALNDLTIGLLITPFGLMPALFHCWPYGEIFCQIQALLRGALSQQSAVILVCMAVDRYMCALHPRRYYQHSSKKGCVAILSLTWIISLTVFGFLVLPKGYYFNNTGLMACEPFYSKPSYRILSTCALYFPTTMVLMYCYGSSFHMSRFRLNDPTMPLTAAAHHPHPHPHPTAAQQLQMHQHQQHHQQAGMHSHLYHGHSHHPSHPSHPNHPNHHGHPHHHGPPVMGHLSMAMSMGLAGMPNMTNKITKKVSQLNRIVPIQEKNSSGSTSRSMAAISLGFIVMVTPWTIQEIVTACTGSKASVLYKGLLCDRFLPPFLDFLVTWTALSNSLWNPFMYWLLNSDFRRMSRQLMPNKCFPHEDTPEHKSGCCHINANDFEITTLPIPPEPPSSRPPGGAGGGGGGPSSGGPSSGGGVASSIGGSVLGICGRSRTNSLSRSASQYIRGTMGGGVHNHQATETFSTTRPDIEGLSEKYWGEILERTVSSGNLNAMQKHLPPHLPYAHHLVHQIHQPQQHHQQQTTSFSKASDLQLNLNLSQAATAAELGKFSNSEPKLCEHLFHDYAEDVILAKNQLLARQAKCSHHPLHQQAKTRLHSHTGSLRFSRIRAACHSPPPEKSAFPMAEYRK

SEQ ID NO: 154 - DNA, 3332 bp, Drosophila
gataaagcccaattacagaacctaatacatacacctaaaatgactaattgacatccattgtgcgtattacataataatgaataatttaagtgatagttgtttgaacttacagaacacttcttagtattgcggactcatcccatccaactgttgactcatttcaaattctatttaattatatttctggtcctggcacgaacaataaattgagtttatatgtattacgccccttcttgtggtctcactttatgaaaaagttaattgcgtgtagttgttggctttgctagatggatttttattgtgccgctttactgtctgcttttttcttcattttccactcgcctttcatttttcatccgccggaaagcgaatcattttttcgcacgctgagcagtgcaaagaaagcaaacacaagcaaacgagcagaatttcatatagttgattgcattgtctgcaggaagatgttcgcacgatgatgcaggacatgcaggactaaggacttcgaagcgaatggtgtgggctggggcagggatagtctcatgaaatgctgatagcatgcgctcaatattgtcagtaaataatacgcgcttgttagagccaactgcataccaactaaactgaacacagtgagaataaacataacagaaagttgaatttgcttaatatataatttcataaatttgtcacaccaaaattcggatttaaattaaaagtataattatattaataacattatttaatataattataattatatataaaaatatatttttatatgtatgtttcatttggttgctgaaaaccagtaactaactaatctttgtgggctatccaaatctcttcattgcagaaaccgcagcgtgcaacatgtgacgtcacaggcataaagtatggagagcatattaaaatatttgccatttagctggtttagcatgcattgttgcattgactgccacataacaagtggaaattagcaggcagctactgtagacgaatcgaaatggaaggtggatggtggcgaggaggaggaggaggaggacgtttgggcgggaaagccatcatggaaggacactcgacaccaaatggggcagctgcaagccacagaaacaacagcacaaggaccaatatcgcgaccaacggctgtgcccattcgggcatcctgttatttgtgctgacagctatgacactaacgagcttaataacgcccacagagcagctggcagtggcgccaaatggcaccacactgcatcaactggagtccgtggagtccgagtcgtatccatccataaatggcactcagaatgaaacaatggtgaccagtgtgcgaccccacctggaccacaggaatcgaccgacgcagcagaatggcagtcactatttggagtacgacgatgatggcccggactgttcgtacagctacaacttcatcctgaagctcatcacgatgatcctgtacgcactggtctgcatcattggactctttggcaacaccctggtgatctatgtggtgatgaggttctccaagatgcagaccgtaaccaacatatacatactgaatctggctatcgcggatgagtgcttcctgatcggcattcccttcctgctctacacaatgcaggtgggcaactggcccttcggcaactatatgtgcaaggcctacatggtgagcacctcgatcacctccttcacctcctcgatcttcctgttgatcatgtcggcggatcgctacatagccgtttgccatcccatatcctcgcctcgctaccgaacgccctttgtatccaagttggtttcggccttcgcctggatgacatccgtgctgctgatgctgccggttatcctttttgccagcaccgtgcagtcgagcaacggcaatgtgtcctgcaacatcgagtggccagacactcagaactcgcacaccgactccaccttcattttgtactcgctggtcttgggattcgccactccactgacttttatcctggtgttctactgcctggtgatcaggaaacttcacaccgtgggaccgaagcacaagtctaaggagaagaagcgctctcacaggaaggtcaccaagttggtgctcacggtaataatatatgacatttcgattagttgtggaactaactactacctgaccactcttgtgttcagtttgataaatattattattacattataaatatatatttttttttgacattttgaattcgactataaattaattgttttaaattgatatatagaaagaattttataatatttattcaatacaatttatggttttttgatttctccacaggtcataagtgcgtacatattttgttggcttccacactggatttcacaggtaactaattgtatacattacagtctaaaaacatttatctttgtgtactttaaaaggttttaaaaccataagctatttgcctactattatccttttggattgatttttaaattattatagctaaaacaaattacgagatttgtggaaattgacatgaactggacttctttggcagatcatttgtagattcgctttttattgactattttccaggtggctttgatcagctccgctcctcaacgctgtgcatctcgtctggagctggccgtcttcctggcctgcggatgcctcagctactccaactcggccatgaacccaatactgtacgcctttttgagcgataacttcaagaagagcttcatgaaggcctgcacgtgtgctgcccgcaaggatgtgaatgcccagttgcagctggagaacagtttcttccccaagtttggcaagggcaggcaatcggagcgtcttcttggtggcaatggaaaaggtggcgcccagcgtggggcattaaccaagaagaagtgcttggcgacgagaaacaacaatgctccgatggccactacaacgacgacgacaaccaccacaacgggcacggatgcagtgacctgtctccagccgccagtacaccaggtgccagccgagatccaggtgggaaatccggccaccgtgctggtggtcaatgctgagaccaacaactgtaaaccgcccgtgctccacacggacttataagaccgggctccctcgatgcccctggaaacggtggtcttcatcgcgcggaggtgagaccatcaggttgagctggacctcgatacggccatcgattgccaggcaatagcgaggcagccggaatgcttgctataggtcgcctaaaatgatattaacattttataccaatatggcagagctttgcaaaaacgggtaaacttaatcccatttttatatgatcgaatctcagcaagaagaaatttttaaaaacccgaataaa

SEQ ID NO: 155 - DNA, 1332 bp, Drosophila
atggaaggtggatggtggcgaggaggaggaggaggaggacgtttgggcgggaaagccatcatggaaggacactcgacaccaaatggggcagctgcaagccacagaaacaacagcacaaggaccaatatcgcgaccaacggctgtgcccattcgggcatcctgttatttgtgctgacagctatgacactaacgagcttaataacgcccacagagcagctggcagtggcgccaaatggcaccacactgcatcaactggagtccgtggagtccgagtcgtatccatccataaatggcactcagaatgaaacaatggtgaccagtgtgcgaccccacctggaccacaggaatcgaccgacgcagcagaatggcagtcactatttggagtacgacgatgatggcccggactgttcgtacagctacaacttcatcctgaagctcatcacgatgatcctgtacgcactggtctgcatcattggactctttggcaacaccctggtgatctatgtggtgatgaggttctccaagatgcagaccgtaaccaacatatacatactgaatctggctatcgcggatgagtgcttcctgatcggcattcccttcctgctctacacaatgcaggtgggcaactggcccttcggcaactatatgtgcaaggcctacatggtgagcacctcgatcacctccttcacctcctcgatcttcctgttgatcatgtcggcggatcgctacatagccgtttgccatcccatatcctcgcctcgctaccgaacgccctttgtatccaagttggtttcggccttcgcctggatgacatccgtgctgctgatgctgccggttatcctttttgccagcaccgtgcagtcgagcaacggcaatgtgtcctgcaacatcgagtggccagacactcagaactcgcacaccgactccaccttcattttgtactcgctggtcttgggattcgccactccactgacttttatcctggtgttctactgcctggtgatcaggaaacttcacaccgtgggaccgaagcacaagtctaaggagaagaagcgctctcacaggaaggtcaccaagttggtgctcacggtaataatatatgacatttcgattagttgtggaactaactactacctgaccactcttgtgttcagtttgataaatattattattacattataaatatatatttttttttgacattttgaattcgactataaattaattgttttaaattgatatatagaaagaattttataatatttattcaatacaatttatggttttttgatttctccacaggtcataagtgcgtacatattttgttggctt

SEQ ID NO: 156 - protein, 393 aa, Drosophila
MEGGWWRGGGGGGRLGGKAIMEGHSTPNGAAASHRNNSTRTNIATNGCAHSGILLFVLTAMTLTSLITPTEQLAVAPNGTTLHQLESVESESYPSINGTQNETMVTSVRPHLDHRNRPTQQNGSHYLEYDDDGPDCSYSYNFILKLITMILYALVCIIGLFGNTLVIYVVMRFSKMQTVTNIYILNLAIADECFLIGIPFLLYTMQVGNWPFGNYMCKAYMVSTSITSFTSSIFLLIMSADRYIAVCHPISSPRYRTPFVSKLVSAFAWMTSVLLMLPVILFASTVQSSNGNVSCNIEWPDTQNSHTDSTFILYSLVLGFATPLTFILVFYCLVIRKLHTVGPKHKSKEKKRSHRKVTKLVLTVIIYDISISCGTNYYLTTLVFSLINIIITL

SEQ ID NO: 157 - DNA, 5453 bp, Drosophila
gataaaagcattacattttcgagtctgcacgatcgtatcatcagttgtttgcaggaccttgagttcttcatacaaagttttagctgctcatttttaatctgttccttgtgcagagattacacttctccgaaaagagccgacacgtaaattggaaaagggttagtgcaactgttgttgcaattacaattcatcacatagcccgtagttcctcttcctgctgcacagaaagaaattggtatgtggcgatcgttgcaatgccatgcaattcaatgcccaattcaaaaatatttgaaatgtgtaaacaactcacttgttttcttttctgcgtgcatgtggtgctcctggccatttgccatttcgccaggcataatcccgacaatcggtgcgatgtgggtgatacgagtgcgaatgcgaatgcgaatgccaatgatatgtgtattgtatgtatgtgcatacatatggcgtcgtagcgtgtgggcgtgatgtttgcactccggtgcagcgggactataaataagccgggtatttattaggggcaatcataaactgcgttaacgacgggcactctgccaacgagaataagatccggtaaacaaaggcaccggtcgacgtacgtctcattgtgcgataagctttcaattaaatctgacccggataacggggcgcatgggtgcgggaaatcggaaatcggaaacgaaaacgaaaacggaagcggaaatcgaaatcgaaatggaaagagatcaattttcaattgcagccaatgcatgcatgtccatgggtccaatgctaatatcgaaagacaaagctccgtgttctggaggtcgtgttcgccatgcagactcattggttggttgggtttaactcgtacaaagtttgatgggtttgggattgttttttttttttttttagaacgatataactcgatataatgctggtgcgtaaataacaacgatgttcattgttcgctttgcagcacatttactatgcggtcgatggcaaaatgaccctcctgtcgaacattctcgactgcggaggctgtatttccgcccagcgcttcacccgcctgctgcgccagtccggctcatcaggaccatccccatctgcaccgacggccggaacatttgaatcaaaatccatgctggagccaacatcctcgcacagcctggcgaccggacgcgtgccactactgcacgatttcgatgcctcgacaacggaatcgccgggaacgtatgtcctcgacggtgtcgccagggtggcccaattggccctggagcccaccgtcatggacgcactgcccgattcggacacggaacaggttctcggtaatctcaacagcagcgcgccctggaatctaacgcttgcgtcggcagcggccaccaatttcgagaactgctcggcgctttttgtcaattacaccctaccacaaacaggtacctaaagcctaataacttttaaatcatattgcagtatttttttttttttttttgttgccgggataggactctactgcaattggacctgggacacattgctctgctggccacccactccggctggagtccttgcacggatgaattgtcctggcggctttcatggcgtagatacgcgcagtaagtaactgaaatacactctaaaaaaaaagcagccgaaaaagaacatgctgagtacaattagcataattaatcgttgaagctgtttagctgtttagcagccacaagaagctttatgacttctgccggcttattaggagtcaaaagacatgtcctacggtgtttatcccatccacacggcatatctggcggtcacaatcatacggatcattagctgggaaacggttcaagtggtgcacggcaaacaattacttgattccgtattcatcgaaaggatgtcaatatttacatgcatgactgggggcgtccaatcaaccgcactcccagtcggggccgcccctccttggcttccatcgccgggggctgtccaggtgtttcatgtgcaccctcgagctccgccagttgaacagggtttaaaacaccagccaatcgattgcttaattacgatcctaaatgcttgctctacccctccgataaattaaacgttctgcaatggggaattgctatttaataaccatgggcgatatacactgagcgaaaagattctaagtagctgacttaccacccaatattttacaaacttaaaatgctcttccattatcactagtgaatgtattatctgcgcttgtggtgcaaaatctaggcatatcgaactatatctgttaagaaataattattcgagtgcattgttgagctacggcctcatttctccgggccgtgtctagatttttagccccaatattttcaactggacgaggtcggtcgcccattcgattggcataattgcacttgtcagtcagtgtgtcaaagctcgattactgtcattaatccaacccaacctccctctttttcggttcgcagaattcgccatccgaaagtgtgagctggatggtcgatggggcagcaggccaaatgccacggaggtgaatccgccgggatggacggactacgggccgtgttacaagccggagattatccgtctcatgcagcagatgggcagcaaggacttcgatgtgagttgaattctttccacactacatcataatacctgtttcagttatagttaagagcattgcttaaatgccaaccaaaatcccaaatcaagggtatggttttgaaattacctaatagggttccaagttttttagacaccctaaaaagtgatttcaaaggcctgattacatttgttgatagtggtttatagtagtagttttaattccatttcttccaactggtttgcgatatcccttaggcctacatagacattgccaggaggactcgaaccctggagatcgtgggcctctgcctctccctgttcgcccttatagtttccctgctgatcttctgcacatttcgctcgctgcgaaacaatcgcaccaagatccacaagaatcttttcgtcgccatggtgctgcaggtgatcattcgcctgaccttgtatctcgaccaattccggcggggaaacaaggaggcggccaccaacacgagtctctctgtcattgagaacacggtaggcttaatattcccgcataaggataaggtataaggcttatgttcgatattatatgttatgttctacagccctatttgtgcgaagcatcctatgtacttctggagtacgctcgtaccgccatgttcatgtggatgttcatcgagggcctttacctgcacaacatggtcaccgtggccgttttccagggcagctttcccctcaagttcttctcgcgactcggctggtgtgtgcccattctgatgaccaccgtgtgggcgagatgcacggtcatgtatatggacacctcgctgggcgaatgcttgtggaactataatctcacgccctactactggatcctcgaggggccacgactagcggtcatactggtgggtaatatcaactgttgatcgctttaatcacctattcacccaactgaaaacatccgcatgcagctaaacttctgtttcctggtgaacattatccgagtgctggtaatgaagctgcgtcaatcgcaggccagcgatatagaacagactcgcaaggcagttagagcggctatagtcctactaccacttttgggtataaccaatctcctgcaccagctggctcctctgaaaacggccacgaacttcgcggtctggtcgtatggcacccactttctcacctcgtttcagggattttttatagcgctaatttactgctttctaaatggcgaggtaagacatcaagtcactcagttgtccatttgcctaaaaccctcactatttccaaccaaaatatatattttttaggttcgtgccgtgctactaaagagtctggccacccagctgtcggtgcgaggtcatccggaatgggcgccgaaaagggcatctatgtactcgggtgcttataacacggcgccggatacggatgcagtgcagcctgcaggagatccatcggccactggaaagcggtaagcatccgctttgtgcacaccccaccttgaaactccttacatcaatttaaaactcccagaatatcaccgccgaataaaaggctgaatggaagaaagccgagcagtgccagcattgtgatgattcacgagcctcaacagcgccagcgactgatgccccggctgcaaaacaaggcgcgggaaaagggcaaggaccgggtggagaagacggatgcggaagcggagccggatccgaccatctcccacattcacagcaaggaggcgggcagcgcgagatcgcgaactcgcggctccaagtggataatgggcatctgcttccggggtcaaaaggtactaagagtaccgtcagcgtcatccgtgccacccgagtcagttgtatttgagttgtcagagcagtagaccaaaacctagcctaactaatagatgtagccatagccgtagccaaatagccgtagaagtagccaacgccatgtagcccaccaccacagtagccagcacccacacaatcggaccggaaatgatcccaaagataacccagaacccgactattcctgcatctcccatcgacccaccaagcaagccagctggaaacagcacatatgtaaaataccccaacaaaatatcgcagttcttatacccaagatcattttgaacagaaagtaagctcattgttttgtaattcaaattaaaccaatagacatttaatttaaatagttattttcgcttgccttcggttcttgctccactgtacttatgtaaatacatacatacctttatttgtgtaagccatatccaaaccctttccaaaatctagaaatctcctatcctttcgaaatcggctaatcctacgaaaattcaaatttccctacaagttttacaaaatatttttgatgacaataaatttccaatagcgtcaccttctgttctggacacgcaaatacattcaaaaacactcgcacacggttcttactcgatgaatttttcagcaaaacttcagcggcatgttcttttacttctactattcatatttaaatattagattgaaatatttaagtgaattaacacaaacttgcggtaactgcgcagtgtggccaggctttgtgagccattagaacttattacataacataattgaaaagtgacattgtttaaaggaactcacctttaatcaactgttgaacttgctgttcatcggattccgttattaagttttaagatttgggtttacttgtatttacattttctttaccactttgattagcttacactttccgttcctgagctggtcacactgccagctacaatcgatcacgttcactgcaactgccttgaattttgctagctgcgctttgttgtgcaacaaaaactttgccacaatcgatatttaactaatggggtc

SEQ ID NO: 158 - DNA, 1902 bp, Drosophila
atgaccctcctgtcgaacattctcgactgcggaggctgtatttccgcccagcgcttcacccgcctgctgcgccagtccggctcatcaggaccatccccatctgcaccgacggccggaacatttgaatcaaaatccatgctggagccaacatcctcgcacagcctggcgaccggacgcgtgccactactgcacgatttcgatgcctcgacaacggaatcgccgggaacgtatgtcctcgacggtgtcgccagggtggcccaattggccctggagcccaccgtcatggacgcactgcccgattcggacacggaacaggttctcggactctactgcaattggacctgggacacattgctctgctggccacccactccggctggagtccttgcacggatgaattgtcctggcggctttcatggcgtagatacgcgcaaattcgccatccgaaagtgtgagctggatggtcgatggggcagcaggccaaatgccacggaggtgaatccgccgggatggacggactacgggccgtgttacaagccggagattatccgtctcatgcagcagatgggcagcaaggacttcgatgcctacatagacattgccaggaggactcgaaccctggagatcgtgggcctctgcctctccctgttcgcccttatagtttccctgctgatcttctgcacatttcgctcgctgcgaaacaatcgcaccaagatccacaagaatcttttcgtcgccatggtgctgcaggtgatcattcgcctgaccttgtatctcgaccaattccggcggggaaacaaggaggcggccaccaacacgagtctctctgtcattgagaacacgccctatttgtgcgaagcatcctatgtacttctggagtacgctcgtaccgccatgttcatgtggatgttcatcgagggcctttacctgcacaacatggtcaccgtggccgttttccagggcagctttcccctcaagttcttctcgcgactcggctggtgtgtgcccattctgatgaccaccgtgtgggcgagatgcacggtcatgtatatggacacctcgctgggcgaatgcttgtggaactataatctcacgccctactactggatcctcgaggggccacgactagcggtcatactgctaaacttctgtttcctggtgaacattatccgagtgctggtaatgaagctgcgtcaatcgcaggccagcgatatagaacagactcgcaaggcagttagagcggctatagtcctactaccacttttgggtataaccaatctcctgcaccagctggctcctctgaaaacggccacgaacttcgcggtctggtcgtatggcacccactttctcacctcgtttcagggattttttatagcgctaatttactgctttctaaatggcgaggttcgtgccgtgctactaaagagtctggccacccagctgtcggtgcgaggtcatccggaatgggcgccgaaaagggcatctatgtactcgggtgcttataacacggcgccggatacggatgcagtgcagcctgcaggagatccatcggccactggaaagcgaatatcaccgccgaataaaaggctgaatggaagaaagccgagcagtgccagcattgtgatgattcacgagcctcaacagcgccagcgactgatgccccggctgcaaaacaaggcgcgggaaaagggcaaggaccgggtggagaagacggatgcggaagcggagccggatccgaccatctcccacattcacagcaaggaggcgggcagcgcgagatcgcgaactcgcggctccaagtggataatgggcatctgcttccggggtcaaaaggtactaagagtaccgtcagcgtcatccgtgccacccgagtcagttgtatttgagttgtcagagcagtag

SEQ ID NO: 159 - protein, 633 aa, Drosophila
MTLLSNILDCGGCISAQRFTRLLRQSGSSGPSPSAPTAGTFESKSMLEPTSSHSLATGRVPLLHDFDASTTESPGTYVLDGVARVAQLALEPTVMDALPDSDTEQVLGLYCNWTWDTLLCWPPTPAGVLARMNCPGGFHGVDTRKFAIRKCELDGRWGSRPNATEVNPPGWTDYGPCYKPEIIRLMQQMGSKDFDAYIDIARRTRTLEIVGLCLSLFALIVSLLIFCTFRSLRNNRTKIHKNLFVAMVLQVIIRLTLYLDQFRRGNKEAATNTSLSVIENTPYLCEASYVLLEYARTAMFMWMFIEGLYLHNMVTVAVFQGSFPLKFFSRLGWCVPILMTTVWARCTVMYMDTSLGECLWNYNLTPYYWILEGPRLAVILLNFCFLVNIIRVLVMKLRQSQASDIEQTRKAVRAAIVLLPLLGITNLLHQLAPLKTATNFAVWSYGTHFLTSFQGFFIALIYCFLNGEVRAVLLKSLATQLSVRGHPEWAPKRASMYSGAYNTAPDTDAVQPAGDPSATGKRISPPNKRLNGRKPSSASIVMIHEPQQRQRLMPRLQNKAREKGKDRVEKTDAEAEPDPTISHIHSKEAGSARSRTRGSKWIMGICFRGQKVLRVPSASSVPPESVVFELSEQ

SEQ ID NO: 160 - DNA, 4385 bp, Drosophila
gcttacaaaaccaaaaaccagattttgtgcttcaaatcacaaacataacgaaagaaatatgaatggaaaacagaggattttatcatcacttgaaggctgacaaaacatttggcacaatttacattgtccggcgatttattgccgtctagagacaaaaaacactccggaaaattgtcactttgcttgcagtaagaaagtaacttttaattagaggttactgcagctatgcagctgctactgcggttgctactaaaagcaaaagtgaagatatatcctttgaatctcagcacaaattgcattctccgtattttctcatttgtctaatggagttatgtcaccaagaaatgcgtgagtgttacactcacaaaatatgttctattcccaagaaattcttctctgtaagtaagtgtaaaagtgtgtacactaactctgtttgtattaaagacaaatgcataagaatgccttaaattcgtctacgtgtaacatgtaagccagaatttttgttgcatgttacacgttttcccacaaattgccaaaatcatctgcttctgccggcccactagtcgtatgcgtattattgattacggaacgaggccttgttttcttaccatttcggacaaatggtaatgacatttcattgttgattcgtttgaaatcgtacctttgacctgccctgaacttggacatcgttctttgcatgtggcatgcaatgccattgtatttggggaatttcgaagcttaaattctggtaaaattcaaaccacaacactgaattcgttttttattcacctaacgcctgatgtttatttgcaggtagcaggtagcactttcgccacgcagcctgcatatttgagtgttggaatttccgaaaagggaatttaaatgaaacgccagaggagcagcggggcgcactgagttggcagccggacaccgcggtcaatcaaacggagtccttgcaggacatcccaccaccgactaccatctggccttcattgacaccatggtcacgaacatgtcgcagccgcattattgcggcaccggcatcgatgatttccacacaaagtgagtagaacgaggacgtggacttaggcctgggcacatagcccctgggtatgtctgcatattaattagttttttaagtgtaatttacataatgatttgccagccggggggcgcataatgaaatcatgtgtgtaattgcctacggccgtggtggcaaaaaggctaacgaagtgtgcctaatgtggatgggcccctttcggattaaactgaacaaatactcgcataaatccataaagcagatgttaaaggtcggagatgaacattttgaaaaatatattgagttcaatctaaccaaccatgttgtttattcggtttctttctctacataagctctaattactttaagaatttaatcatacccaattttgtgctcaagtgaaactggttttaaatatttatcccaattttttttgtctttctccccaacagctacaaatactttcacggttacttctcgctgattgtctgtatcctgggaaccattgcgaataccctaaatatcatagtgctgacccgacgggagatgcgctcccccacaaatgccatactcacgggtctggctgtcgccgatctggctgtgatgctggaatacataccctatacggtgcacgactatatcctcagtgtaaggctgccgcgagaggagcagctcagctacagctgggcgtgcttcatcaagtttcactcggtatttccccaggtgctgcacaccatctccatttggctaacggtgacgctggcagtttggcggtacatagcggtaagctatccgcaaaggaatcgcatctggtgtggaatgcgaactactctgatcaccatagccacggcctatgttgtctgtgtcctggtagtgtcaccttggctgtacctagtcacagccattgccaagttcctagagactttggatgccaatggcaagacgattgcctcagtgccattgagtcaatacattctggactacaatcggcaggatgaggtgaccatgcaggtcatgtcgagtacaacgccagatgtttcctgggcgataccaagtgattcggccaatggaactgcagttagcttgctaagtctaaccacagtgatacccctaaccacattaagcactggagtaaccacatcctcgtcgttgggtgagcgcaatgtgactgtctataagctgtatcacagcgcactggcgctgcgtgatcggcagttcaggaatgcgaccttccttatatacagtgtcctgatcaagctgataccctgcttcgcactgaccattctgtctgtgcggctcatcggtgctctgttggaggccaaaaggaggaggaagatcctggcctgtcatgcagccaacgatatgcagccaattgtcaatggaaaggtggtgattccgacgcaacccaagagctgtaaactgctggagaaggagaagcagaccgatcgcaccacgaggatgcttctggcggtactgctgctcttcctggtcaccgagtttccacagggcattatgggtctgctgaatgtgctcctgggcgatgccttctttctgcaatgttacctaaagctgagtaagtattttaggattaagacacccactcctccgctgtctgtaacccgtaattgctttattggctatgataattgactgaatttatggttggtgtttaggtgggcccagtttggcacattcatcaatcatacgcaccgttggctgccataattgcaccacaaatttgaggcttcaatgaaggcctggcattgacgtgttcaataagtgtacattttgtttatctcgtacacccaaaataaagtagtcttacatttaaaacttcgcagatactattaaattgagagatttttttctttaatttgagtaaaagtataaaattgaaaaaaaaatattttaaacatttaatatgtagtttttagctagcatatgttttttcaagtgtaggaggtataaaatctaatcgcccttgaactttatgaaagccctgcccatagatggcgtgttggtggaacccgacatttatggcatttcgattttttcgtttcaggtgaccttatggacatcttggcgcttattaattcgagcatcaacttcatcctgtactgttcgatgagccgccagttccggagcacgttcgcgctcctcttccgtccgcgctggctggacaaatggctgccgctgtcgcagcacgacggcgaagggagggtgggcggaagtggcggcctgggcggctacggcggatatggacggcagcggttgctgcacacggatgccgttagcaagagcatggccatcgatctcgggctgacgacccaagtgacaaatgtgtagcaggagagcagcggccgggcggcgatgtcagccgcagccggcggagcagctgcatcggtggctctggccctggcagccactgatgttgatggatgtccgcctgccaccgatgctgctgtttccactaacgacatcagcctggtcgagaagctacatttgcagcccagtccaagggggactgcgatatccagtggccagcatcgaaggcggcgcagtgggagtggcaccaagtgcatctggcccacgacggactggctgagaaagctgcgtaaccagaaggctagagaaacggagcaatcctccgaacaggacatagagctgggcaagagctccatcaacaggcgcagcagtgttcttctaatggtattactaagcagctccgatgaggttaaagccaaggcggttttggtcagtgaacagccgccgagtccagcggacgaggatgtggaagacgccattgacgccctctggctgtgagacgacccctcacttccattttgtacgccctgtaaattatccaagtacccactaatatttaactaccgtgtacagaccaattattgagacaaattgttatgcgctgattccattattttcccgccagtgttgtcttggcgaatcgagagcccctttcgctgagactttgctttgctggaaaatgagtggattttccttgaaaggactccctggaagcagcctgcaacattttgtgaccacatttgataagtgatatacttgactaagtttccccccttaatagttgtgtaagtgctaagcgcgtctctagatataaacgaattagtcatagtctaactattaattaagatatattgatgaaataattcggaagctaagagattaaatttctttttatattgaataaatgttttttcgaagtaaacttgattcaattcacttattgtaagtgttattgcgacactttgttttaattaaacggaatttatattgaactttgataaacgaatgcttttgaatgcat

SEQ ID NO: 161 - DNA, 1389 bp, Drosophila
atggtcacgaacatgtcgcagccgcattattgcggcaccggcatcgatgatttccacacaaactacaaatactttcacggttacttctcgctgattgtctgtatcctgggaaccattgcgaataccctaaatatcatagtgctgacccgacgggagatgcgctcccccacaaatgccatactcacgggtctggctgtcgccgatctggctgtgatgctggaatacataccctatacggtgcacgactatatcctcagtgtaaggctgccgcgagaggagcagctcagctacagctgggcgtgcttcatcaagtttcactcggtatttccccaggtgctgcacaccatctccatttggctaacggtgacgctggcagtttggcggtacatagcggtaagctatccgcaaaggaatcgcatctggtgtggaatgcgaactactctgatcaccatagccacggcctatgttgtctgtgtcctggtagtgtcaccttggctgtacctagtcacagccattgccaagttcctagagactttggatgccaatggcaagacgattgcctcagtgccattgagtcaatacattctggactacaatcggcaggatgaggtgaccatgcaggtcatgtcgagtacaacgccagatgtttcctgggcgataccaataaccacatcctcgtcgttgggtgagcgcaatgtgactgtctataagctgtatcacagcgcactggcgctgcgtgatcggcagttcaggaatgcgaccttccttatatacagtgtcctgatcaagctgataccctgcttcgcactgaccattctgtctgtgcggctcatcggtgctctgttggaggccaaaaggaggaggaagatcctggcctgtcatgcagccaacgatatgcagccaattgtcaatggaaaggtggtgattccgacgcaacccaagagctgtaaactgctggagaaggagaagcagaccgatcgcaccacgaggatgcttctggcggtactgctgctcttcctggtcaccgagtttccacagggcattatgggtctgctgaatgtgctcctgggcgatgccttctttctgcaatgttacctaaagctgagtgaccttatggacatcttggcgcttattaattcgagcatcaacttcatcctgtactgttcgatgagccgccagttccggagcacgttcgcgctcctcttccgtccgcgctggctggacaaatggctgccgctgtcgcagcacgacggcgaagggagggtgggcggaagtggcggcctgggcggctacggcggatatggacggcagcggttgctgcacacggatgccgttagcaagagcatggccatcgatctcgggctgacgacccaagtgacaaatgtgtag

SEQ ID NO: 162 - protein, 462 aa, Drosophila
MVTNMSQPHYCGTGIDDFHTNYKYFHGYFSLIVCILGTIANTLNIIVLTRREMRSPTNAILTGLAVADLAVMLEYIPYTVHDYILSVRLPREEQLSYSWACFIKFHSVFPQVLHTISIWLTVTLAVWRYIAVSYPQRNRIWCGMRTTLITIATAYVVCVLVVSPWLYLVTAIAKFLETLDANGKTIASVPLSQYILDYNRQDEVTMQVMSSTTPDVSWAIPITTSSSLGERNVTVYKLYHSALALRDRQFRNATFLIYSVLIKLIPCFALTILSVRLIGALLEAKRRRKILACHAANDMQPIVNGKVVIPTQPKSCKLLEKEKQTDRTTRMLLAVLLLFLVTEFPQGIMGLLNVLLGDAFFLQCYLKLSDLMDILALINSSINFILYCSMSRQFRSTFALLFRPRWLDKWLPLSQHDGEGRVGGSGGLGGYGGYGRQRLLHTDAVSKSMAIDLGLTTQVTNV

SEQ ID NO: 163 - DNA, 4214 bp, Drosophila
ataattcttatgaaaaatataaaaatgggctgattaaaatgattggtattatggaaattattattgaaaaaatatgaaatttacattttaaaaagtgttattcgcgttattactcagtttgtaaatagcgggcatcaattgtgcatagtttgaaggtaagttgcccaataaatggcgcaaagctcgtaaccgcgaattatatatgtatgtacatatacgataaaaataaagtgtggcctttgcttggataaaaaaatcgtccgagtcgccggatatccatattatcgctttcagaaaattcgatatcatcgataggtgtttccctttcaaaagtcttcgtccgatttggtccgtttgactacttttatctggtgcatacccgatttgactgcttggacggagtgggatgtgtgaatgaacactaaaacgcttgaaacttgagaaattagggaagtagacgggtagcgtcagtttgtttgagaagattaacaagcccacaaactgcacaaaacttgcaaggccattttattatttgtctatccattttcgatcgatatggcaacaacatttaagccatgcccactctaatgcgtcaataaatgcgactaatccaggcgggcccccaagttaacttggccctcctcatcgagtcaagcgcttccttcgaagaatgatttaccgttgatcataccgggaagccttttttggtcttcaggggaggtagagactacatgtggtattaagatgaaaaaactaaatgcgtacatcaaatcaaaagtattcttattaatccaagtgaattataatatttattttggcaccttgtaaatgtgacaagtgattagaaatgtggttcttcttaaagatataaatgtacatcataatatgctagagtactgaggcactattatttatatactctcccgtgtgcgacagactaaatgattcataatgaatatgaataccagagttcacagatgagcaataatctcagttcctgttaaagtgatgtcactgtcggcttgtagggagagtctgtgaaggaaaatatcaatgttaaaagaagataaattaaagcaataagatgaacaccaacctgaagattttagatcgcctttctcatcgaacttgtatacgcgagcattaataatactcagatctgtctgacttgattccctgtaaaaaaaaaaaatgggcaattaaaatattatagcttctattcgaatatttcaacttacacattaatggcccaccaggatttgacgtgcaaattcttgccaaggagcagaataaaaccagctatggccaggcccagaatgcaaattccactccagaagtcaatgatgaagaaatgctctctcactctggccattatatacacgactatttctcggatccagaccgcaaacacgcccactatgtaagcgctaaaggcatagaaactgcaggaatataaaagataaataggtctataataaaaacagcttttaggaaatcttactgcgtcttgacgattttcagttgagtgcccaatatgtactgagtatctggtggcagttcgtagatggaaaagtacgccttgagacagcatacaatgctgaatatcaggaggagtgcaatgggtccgtagtagtagatcaaaataccccaggtgcgaactgaaaatgcatagataattcgaaattagactttgttgtactttcttattcaacctaccatcgaaccagcagtaatcttctcccatgcctggcttgaagtgcttgggcagcttggagtcctgggctaaggagaccaaaaaccgaagaccaatcaccgccagaactgccagagcaagggacaatcgacggacggagctcctgacagccttttgtttaaatttgagcagaaagtcaagactgcaaatggccagaaagacgaaggagagcatgatgcagaagtaggccagaaatccttttgggatgcatagaacaaaataagttatccagttgaagtagacaaaattactcaacctatgtttctgcaagccacatgcgagagcttcatgggattcttcaaggccaagtagaccaacagggagtaaccaacgatcatggacagcaagtagtagatgattaactggccatagtggcttttacgggcatctctcacagatccaagtagggagagtatgaaaatgtttataatgatggctataatactgcctagaagggaacaagagttagaatctcttcgaaagtattcaaacaacacgactcacaaatggcgtaaatccaaacccggtaccccgtttgaaagcgttcgcagttgagcggagtgagctcccactgctccggattgtgctccaacgggctaaagcaatactcatccgttgaccacagacgattgtcccgccgcagagttccattctcgaagaggtcccattgccagaagttatcgtgctttttgtccacgaatttgttccggcaacccagctctgtgcgcaccacaaaacgatcgcgtatgcgtacttgatccacagtcctgttagcgtaggtgagctccacgtgagtggactcgcggacttggtgtggcattgtgcagttccagtgcttggcatcaaagacgaggttctccggacaacagaaactgatgcagggcttcagcagacagacgcagccgcgcagatgtttcttggcccggtactccactccatcgatcaccttgaaggagtactccgccatcagatgcggtgggaccactactccagcgtatgagtaggagccatccttcatccgcagtccatccgtaatgttgaccgtgtgggcgtaggcacagggatggtttatactggcgatctccactgactttgcgcccacggagagccaaataattaaaagaattatcaatggcgagaccatggctaactgatccacgcttgttggatttttggtcgattcgttcgtcggcctgacgtcacacgctgttcagctcgataattaagtaaacaaatatgagaagcgatcgccgttcgctttgagcaatgcacgcacactcgccgagtcagaaatctgcaccaacaacaatggaaacccaaaattgacaacgaatgtgacgcgggtctaaaaacggctgcgattgcgacaacgacaccgacaacaccaaaaagaacaaccataaacataaaagtttggtggagagtctctcctagctagtcgtcttgcctctctctaaacgacaaaccggcaaccgcaacggagctccatgctggccaagaataaaaaacagactaactgattagccgttcccaaaaccagacgcgaccacaagcagctggcaaaaagagcgattgggaagactcacaacccgtcccgcccctcctcctagaaaccggcgtggaatctcaaccagctcggaacttgcacatgcataccttaagttgtaagcatataatccattcgagccatttccagacttatcttgagatagatataaaagttaagaatattagattagattatttccatccattttctataatttattgcctttgcgaccgtaaagaaaatccaatttttaaccgacaatccaaatggcccaaacgaatttaccacagctttagtttttaaatatttaggtgcatttccaggctatacaaagtttgtctacatgtaggtgtgtgacctggcttgatatcgtttacggtcttcaagaatattcgaaaagattcgttgatttttgacaaacagatccgctgaggaaaaaacgacgttcattttatctttggctttattaagcttgaaatacaattataattcttgtattgtgttttacattagttcagagataatgcagatatggagaatggtacatttatgcaaagagggtatacaatcaacaccaatctcgtttttaacaaggcacatctgtatgttacgtatttttgctggatgtttaccttggacttaggctaatggagaattacaaatttgatctctcagctgggttcggagaaccttacaattttgcttgcataaacagtagatatggctctgcataaatttcttatacaactaatcaggttgttcgtggtcacatggcattaaaaaatgaaagagaattgggcggggtggggtgggtaagggttttcgtggtagttctgggggatagggactttctcttatagtagtgtctttcataaagttctatccgtatgtggatgctacttcgcgaattta

SEQ ID NO: 164 - DNA, 1859 bp, Drosophila
tcgtttagagagaggcaagacgactagctaggagagactctccaccaaacttttatgtttatggttgttctttttggtgttgtcggtgtcgttgtcgcaatcgcagccgtttttagacccgcgtcacattcgttgtcaattttgggtttccattgttgttggtgcagatttctgactcggcgagtgtgcgtgcattgctcaaagcgaacggcgatcgcttctcatatttgtttacttaattatcgagctgaacagcgtgtgacgtcaggccgacgaacgaatcgaccaaaaatccaacaagcgtggatcagttagccatggtctcgccattgataattcttttaattatttggctctccgtgggcgcaaagtcagtggagatcgccagtataaaccatccctgtgcctacgcccacacggtcaacattacggatggactgcggatgaaggatggctcctactcatacgctggagtagtggtcccaccgcatctgatggcggagtactccttcaaggtgatcgatggagtggagtaccgggccaagaaacatctgcgcggctgcgtctgtctgctgaagccctgcatcagtttctgttgtccggagaacctcgtctttgatgccaagcactggaactgcacaatgccacaccaagtccgcgagtccactcacgtggagctcacctacgctaacaggactgtggatcaagtacgcatacgcgatcgttttgtggtgcgcacagagctgggttgccggaacaaattcgtggacaaaaagcacgataacttctggcaatgggacctcttcgagaatggaactctgcggcgggacaatcgtctgtggtcaacggatgagtattgctttagcccgttggagcacaatccggagcagtgggagctcactccgctcaactgcgaacgctttcaaacggggtaccgggtttggatttacgccatttgcagtattatagccatcattataaacattttcatactctccctacttggatctgtgagagatgcccgtaaaagccactatggccagttaatcatctactacttgctgtccatgatcgttggttactccctgttggtctacttggccttgaagaatcccatgaagctctcgcatgtggcttgcagaaacataggatttctggcctacttctgcatcatgctctccttcgtctttctggccatttgcagtcttgactttctgctcaaatttaaacaaaaggctgtcaggagctccgtccgtcgattgtcccttgctctggcagttctggcggtgattggtcttcggtttttggtctccttagcccaggactccaagctgcccaagcacttcaagccaggcatgggagaagattactgctggttcgatgttcgcacctggggtattttgatctactactacggacccattgcactcctcctgatattcagcattgtatgctgtctcaaggcgtacttttccatctacgaactgccaccagatactcagtacatattgggcactcaactgaaaatcgtcaagacgcatttctatgcctttagcgcttacatagtgggcgtgtttgcggtctggatccgagaaatagtcgtgtatataatggccagagtgagagagcatttcttcatcattgacttctggagtggaatttgcattctgggcctggccatagctggttttattctgctccttggcaagaatttgcacgtcaaatcctggtgggccattaatgtggaatcaagtcagacagatctgagtattattaatgctcgcgtatacaagttcgatgagaaaggcgatctaaaatcttcagactctccctacaagccgacagtgacatcactttaa

SEQ ID NO: 165 - protein, 513 aa, Drosophila
MVSPLIILLIIWLSVGAKSVEIASINHPCAYAHTVNITDGLRMKDGSYSYAGVVVPPHLMAEYSFKVIDGVEYRAKKHLRGCVCLLKPCISFCCPENLVFDAKHWNCTMPHQVRESTHVELTYANRTVDQVRIRDRFVVRTELGCRNKFVDKKHDNFWQWDLFENGTLRRDNRLWSTDEYCFSPLEHNPEQWELTPLNCERFQTGYRVWIYAICSIIAIIINIFILSLLGSVRDARKSHYGQLIIYYLLSMIVGYSLLVYLALKNPMKLSHVACRNIGFLAYFCIMLSFVFLAICSLDFLLKFKQKAVRSSVRRLSLALAVLAVIGLRFLVSLAQDSKLPKHFKPGMGEDYCWFDVRTWGILIYYYGPIALLLIFSIVCCLKAYFSIYELPPDTQYILGTQLKIVKTHFYAFSAYIVGVFAVWIREIVVYIMARVREHFFIIDFWSGICILGLAIAGFILLLGKNLHVKSWWAINVESSQTDLSIINARVYKFDEKGDLKSSDSPYKPTVTSL

SEQ ID NO: 166 - DNA, 5208 bp, Drosophila
cgagccatttccagacttatcttgagatagatataaaagttaagaatattagattagattatttccatccattttctataatttattgcctttgcgaccgtaaagaaaatccaatttttaaccgacaatccaaatggcccaaacgaatttaccacagctttagtttttaaatatttaggtgcatttccaggctatacaaagtttgtctacatgtaggtgtgtgacctggcttgatatcgtttacggtcttcaagaatattcgaaaagattcgttgatttttgacaaacagatccgctgaggaaaaaacgacgttcattttatctttggctttattaagcttgaaatacaattataattcttgtattgtgttttacattagttcagagataatgcagatatggagaatggtacatttatgcaaagagggtatacaatcaacaccaatctcgtttttaacaaggcacatctgtatgttacgtatttttgctggatgtttaccttggacttaggctaatggagaattacaaatttgatctctcagctgggttcggagaaccttacaattttgcttgcataaacagtagatatggctctgcataaatttcttatacaactaatcaggttgttcgtggtcacatggcattaaaaaatgaaagagaattgggcggggtggggtgggtaagggttttcgtggtagttctgggggatagggactttctcttatagtagtgtctttcataaagttctatccgtatgtggatgctacttcgcgaatttatagatatcgactttaaatgttgattacagaataatctcatgataggaatatgtagtcctaaaatatgaataagtgatctttatctacagaaaggaacgcagtgttcgcaataatgcgaggatccgatcgaaatgaatataaatgcgattagtccttcctgatctgcacgcatcccgaggtattcaatgctctgcctatggcggcaactgcgagtgctgtgatcagcggaagatggtggttttctgaggatccacgctcgagctgatcactagcggcttctccaccgatggcttctcgtgcagcgacagattggccacgctgctcgacgtggtcttggtggagtactggctctgacgttggttgctgccatcgcgaacactcgagcatctgtgtttgtgtgaagtggtggagtggttatgacgtccattgcgtgggcagcgtggaatagacaatggcggtaaatctgattagaattggttcgtttgagtgcttggattttaagttagggaaaagcagacacattaagcgatcctacaggatataaacaggttaccttcaccaagacacaaaagtggatggtcattatgattagttttcgaggggttagaggttatcagggttatctaatggtttcttccaactggggttaactacaatgtcaactacttctccatttccagaggattacctgtgaccattttgattagatggctatcttcggggtcggactcgggtcggtggcattgctaccggccttgtcaacagccttaaggtgcagctttcttggcagcacattcgcgtcagaagtgatggaagtcgaggtagtggtcgagctcaggccattcgagcgccttttctccaggagtcttcaatgaatagcgatcgatgatgatcaaattgatgttgagacacatgcacatatggacacacatggtggatgcaaacataagtttgtgtttagatcagggcaattaggaatggtacttctgtttagtagctacaaagacgcgaccggactgagtcaccgagctaggcggctggagattcagtgctgtgttggctgtcagtgttcggtttagagttagtctgcaggcagtgtctgttggtgttgagcttgcttttaagcaatatcgaaagcagtctgacaacgaaaataagtacaacatataaggtttaaaataatcacagattgcgcgctgtcagaactcgaagtgcatatgtattcccataatcttcaatgggtcttccatcttagtgcaagagatttaaggaacgtggaattagacaggaatcatataacccgaaattttcaatattcttgatttaagcgcgggttagcaaaggccacaacaaacgagcaaccgagctaaaggagaccttcttactgaaatcgacgaaatcgatttagacttcgtgtgaatgaataccactggtggacccattggcaaatgcgttgcggatcaccaccagcttgcggatctggttggaggcgtccataaaccgctgcttcatcgagaacgaagtcggtcccatcgttacgctctcagtctgccgcagactgcgcacacgtatcgttctgagaatagtcggggttacagatatgatggtggacagagtcagagacacgacacacaagagggagtcacgagtcgtgtgaatggacaaacgcccagtgggcgggacaggacataacgtggagttaagaatagagcaacacttacctgtttgtgatcaagtgcttgaccttcttcttcattacaaacaacatgaaaatgagaaagccctgcatcgcattggccagatccgagatataaaagagcttagaccatcccttgtcgctgcccacgaagtacgagataagctccgtgagccaggtgatgcccattatgagaaagaggcgtaagaacaagccgaatctatagttggaccaagcacgataaaaacgtctttaggggaaggtggataagaaatactgaaaggatgacactcacttgtccttctcggttcgtaggttcttggtgctgttctcactcgcaattatccgggccatctcgcgctgcacgccgtgaatcttaatcgccgtcattatgaacatgatggtgttggcaacaacgatcgccagaatgggaccgtagaaatagatcatggctgcccagttgctcatatccagccagcagtatacaccatcaccaatacctggctttaggttcgcgggcaaattggtaagttgctgggcgcaataggtgaaggctaggaaaactagggcaataccccaagagtacagcgaataaaacaggaagcgtttcttctcctggaatcggttaattcctctcgtccctcggaaattgtgccacaagtcaaagctaatgacacttagccacatgtaggcacccataaaaaagaaatatgctgtgtatccaaacactttgcatgtaacaccagtggcatcaacttgatagagttgcacgtagcacagcgaggagtaacccacggagagccctattaaatagcagaccaagctctttccgtgctggttgcggagctcgggaatcaataggtaaacggctatggtaagcatcatgaagggaatggagaacatcatggctagtgcaaggaatttcggtcggattaataaaatgctgtttacaagaagtaaaggtgatcgtttcacttaccatacgaattgataatctttaccgtgctatgatcgtcctgcatgtcacaattggccggatgtatggtgtagaacatgtccgattcgttgacgtatgtcggaaccatgcagaactcgttcttcctgattagcagtttatcgtccacacggagcatggatccgttctcaaagagtagataatcatcccaattgttggtctctggctgcagagaaaacatcttggggcagggtctgaagctttggatagcaaactgcgtaaacatgttgaccaatatcgtagactcgttgcggaaggttatattgagcataggcggatctggccacgttcggttgtccgagtggtctattatgcatccgtcaacttcagagttaaagacctgccgccacgggcagcagatattcaggcaggacttgaacttgcagacgcatcccctaacgtgttcccgaacctctatgcgctccgttagcgagctgtgtatgtagtcgtacgtcccgaccaattctgcgggaactattgtgccgtagtaatcatagcttccgttgggaaagagcctatggcccgtcagattcactgtatcgtagaaattacagggcacatttggatcgtctatggtgtggtagtggtctctctcggccataacgtaagtgccgaagggaatccccggaatcaaccggaacacgaccaagcacaggacgcccagcaatgtaactccgcagtatagggatcctccaggctgatgaattttcttcggcataatgaaggttctgaaattcgtaaatctttattaaatattattacaaatatttgttattattctttaacgtttattcttttaacgtttaaatattcagtggaatatagttattacagttagtcatcagtcgcaacacgcagcaattaagccttagcaagtgaagtcactaattaagacctatttgccgattagttagtcgtttaatgtttatctaagtgagttcactaatttgggcaatagagcaacatctagggacccattagcggggacgagtggtgaatgatctatgcggacaacaggttgtcgaaaagaattaaggaggcgaaacaggatagcgtcacaagcaattagcagccaacgtgtcccatggggaggaaccaggggcggactacccacgacctgagcgccattctccgcgggacatcaatcataaggtcaaccacgcagggagtgcagactgagcaaacatttatggattcgtgttaaattgatagtaactgccattgtctgtcaatagaggtgacagtctccccgaactccactccaaaccaatcccgatctgcccacttttcaagcgctgctaacgagcccgtccataaattcattaccagtgcgaaaagttataccgctcgctatcttatcttgtatcattagcctttggggaccaactaattcattgatccgctgattgtttgcctttgggggagaagcagaagggtaacctgcggcattgtcaggagtgtgggccactaaattagtccgaatttatgggatgcgaacgggtggagaaggacaaacacattaaactccgcacagttggctaatggggaaaatgaatactggcagtgggtggggaagggagagccagagcacttatcttgcggtgggaaattagcataattaatcgctgagcacatgcacttgggaaatttcagcggaccaaattcaatcgtatatatctgcgcactttaaatgtgcgaatgagtgctgcggatgtttg

SEQ ID NO: 167 - DNA, 1914 bp, Drosophila
atgccgaagaaaattcatcagcctggaggatccctatactgcggagttacattgctgggcgtcctgtgcttggtcgtgttccggttgattccggggattcccttcggcacttacgttatggccgagagagaccactaccacaccatagacgatccaaatgtgccctgtaatttctacgatacagtgaatctgacgggccataggctctttcccaacggaagctatgattactacggcacaatagttcccgcagaattggtcgggacgtacgactacatacacagctcgctaacggagcgcatagaggttcgggaacacgttaggggatgcgtctgcaagttcaagtcctgcctgaatatctgctgcccgtggcggcaggtctttaactctgaagttgacggatgcataatagaccactcggacaaccgaacgtggccagatccgcctatgctcaatataaccttccgcaacgagtctacgatattggtcaacatgtttacgcagtttgctatccaaagcttcagaccctgccccaagatgttttctctgcagccagagaccaacaattgggatgattatctactctttgagaacggatccatgctccgtgtggacgataaactgctaatcaggaagaacgagttctgcatggttccgacatacgtcaacgaatcggacatgttctacaccatacatccggccaattgtgacatgcaggacgatcatagcacggtaaagattatcaattcgtatgccgtttacctattgattcccgagctccgcaaccagcacggaaagagcttggtctgctatttaatagggctctccgtgggttactcctcgctgtgctacgtgcaactctatcaagttgatgccactggtgttacatgcaaagtgtttggatacacagcatatttcttttttatgggtgcctacatgtggctaagtgtcattagctttgacttgtggcacaatttccgagggacgagaggaattaaccgattccaggagaagaaacgcttcctgttttattcgctgtactcttggggtattgccctagttttcctagccttcacctattgcgcccagcaacttaccaatttgcccgcgaacctaaagccaggtattggtgatggtgtatactgctggctggatatgagcaactgggcagccatgatctatttctacggtcccattctggcgatcgttgttgccaacaccatcatgttcataatgacggcgattaagattcacggcgtgcagcgcgagatggcccggataattgcgagtgagaacagcaccaagaacctacgaaccgagaaggacaaattcggcttgttcttacgcctctttctcataatgggcatcacctggctcacggagcttatctcgtacttcgtgggcagcgacaagggatggtctaagctcttttatatctcggatctggccaatgcgatgcagggctttctcattttcatgttgtttgtaatgaagaagaaggtcaagcacttgatcacaaacagaacgatacgtgtgcgcagtctgcggcagactgagagcgtaacgatgggaccgacttcgttctcgatgaagcagcggtttatggacgcctccaaccagatccgcaagctggtggtgatccgcaacgcatttgccaatgggtccaccagtgatttaccgccattgtctattccacgctgcccacgcaatggacgtcataaccactccaccacttcacacaaacacagatgctcgagtgttcgcgatggcagcaaccaacgtcagagccagtactccaccaagaccacgtcgagcagcgtggccaatctgtcgctgcacgagaagccatcggtggagaagccgctagtgatcagctcgagcgtggatcctcagaaaaccaccatcttccgctga

SEQ ID NO: 168 - protein, 637 aa, Drosophila
MPKKIHQPGGSLYCGVTLLGVLCLVVFRLIPGIPFGTYVMAERDHYHTIDDPNVPCNFYDTVNLTGHRLFPNGSYDYYGTIVPAELVGTYDYIHSSLTERIEVREHVRGCVCKFKSCLNICCPWRQVFNSEVDGCIIDHSDNRTWPDPPMLNITFRNESTILVNMFTQFAIQSFRPCPKMFSLQPETNNWDDYLLFENGSMLRVDDKLLIRKNEFCMVPTYVNESDMFYTIHPANCDMQDDHSTVKIINSYAVYLLIPELRNQHGKSLVCYLIGLSVGYSSLCYVQLYQVDATGVTCKVFGYTAYFFFMGAYMWLSVISFDLWHNFRGTRGINRFQEKKRFLFYSLYSWGIALVFLAFTYCAQQLTNLPANLKPGIGDGVYCWLDMSNWAAMIYFYGPILAIVVANTIMFIMTAIKIHGVQREMARIIASENSTKNLRTEKDKFGLFLRLFLIMGITWLTELISYFVGSDKGWSKLFYISDLANAMQGFLIFMLFVMKKKVKHLITNRTIRVRSLRQTESVTMGPTSFSMKQRFMDASNQIRKLVVIRNAFANGSTSDLPPLSIPRCPRNGRHNHSTTSHKHRCSSVRDGSNQRQSQYSTKTTSSSVANLSLHEKPSVEKPLVISSSVDPQKTTIFR

SEQ ID NO: 169 - DNA, 3957 bp, Drosophila
ccagacatgcttcctcgatggggcttaacgtcagcggagcagcgatgtcagtggcagccatcatctgaaccgaatgacagtggaggtcgctagaaaaggggttccatttccactagtttatactaccgaactgatacttaaatcaaggcagttaaaaatttaatatgaaaccggaaatggcttcaacatctcgttaacgctctgcccaattctacagtcatccgattttaatgaagcaaaatttactgccatgccatgcaagagatatgaatcaccgcatgggaatagcccacaaaggacccttaccccatgcactctatcatgaacaccgcacacacttttaatctgcgactaattgctgctccgtattgaattgatttcggttgccccaaagtgccacattccaaatctccgttgattggggaaatccccgaaaaacattcgaaccattcgtccctggcgagcacagaaacagcgtctctgattctggcaggaattggagggcatagggcggaccttgtggcggtttgtcgagtgcacaaagtgcaaggttgcgtggccattcatttcgcagccgatgggtggaagtgggcagcggtgggtggcgcccggaaggaagagcatcagtaatctctaagtgcgccttgttcgcattcgtactcgtgccagcattgcataagtgtcagtgtcaacggggcggggatgtggttgtgcttggtggttatgtgggtgtttgtgtggtagtagtgtccttgttggcagacaaaaagactgatgatgatggcattttgttactttgctaccttcctttgtcgcccgtcgcacggcagctcctttagtatgaaatgaggcgaccaggcaagcgcctcgtcatcgaagatcacccaaacagagtacggaccaggacacggcaactcgcacaggcacaggaacaggtgcaggcacaacaactggcaggagcatcggtgtcggcaagggatactggcgcgggatcgaaagcatgaacagggacaatctgcagcagtggtgggagaactcgtatcggcgccaacatccagagcccaccgatgacctcggcctggactccgcggagctgcatctcgccctccaggagcccaaccagctgcccgcggactacgactatggcaactttagtctaggcaatccgtatgacgtggactcagagcactccatttccccgctgacgctgctcctgctcgctgttagctatggcctggtggttttcggcggcgtcgtgggcaactccacgctcgttctgaccctctgctccgcctcttcggtgcgtttgcgtaacccgctgctgctggccgtctgcattgccgatctcctggtcaccggcatctccgctccggtcacgctcctcaatctcgcgatgaaccggaggacgcgatcgctgccccttgtgctgtgcaaggtcatacactacgtacaggtgagtgggtcaatcaaacaagcttaagttagccaagtaactaagttaaccccacgctattcaggtcatgcccgtttcggccagcactatttcgtttttcatgctctcccttgaccgctacgccacagtaaagcatccgcgattggcgcagcttcgccagcggcgctacttgcacgtctccctggcgctgctatcctggctcgcctctgccgccatcagcactccctttctgtttgcctacaaaatcatcgccaagtcgatggtggtcaagggcggtggggcggcgaacaccacgccaaacccggtcagcatcagctgcacctccgacctgggcgccaacgccatgttcatgtccttcatcatcttccacaccatcgccgtgttcgtgttgcctggcattggtgtgctactcaaccactacggcgtccgacgcaagctctgcgccctgtcgctaacggctcgagctgcccatggagagctgccgctgcccattcccatcctgcgacgccagacccacatggtcattgtgacgggctgccccaacgcccagcaagcggcctgtggtgggggcaccacggcggacgacacctcgaacgggaacggcacgggcaccggtggcggtcccatggccgtcagtccgggcgacatacagcttcacacactgcagccgcgccagccaggctctgccggatcggccctcgaaccgggctcctaccgctctagcaatcccatatcacccaggtaagtcataaatattgtgaagttatcagcaaaatcgttgtaaacaggatgtatgcttgatgtagtcaaaagctattagtttatgttaatcatacgccccgttgactttggtcagaatatatttcatcgaatggcagtacgtcatttggtataagttaactaacttgcaaacccacttagggccatgagggagattcgcgcccactcgcagcgccagcgcatcaaccgagcaggcaggggaccagcgacacccggcatcccactgccccaaacctccacgctgcggtcgcgaaggcacctggctaacatgctcatcgcctcggccgtgatcttcattgcctgctgggcaccgcacgtcttctgcatcttctacaagaacttcggcaacaatcagcagtgcagccagacctctgtttacttcagccttctgctaggtaagtctgaattggcaatcattcccaatccgaatccgagtccgaattggaactgactagttgatcgcgttgcaggctacttctactcggccatcagtccggtgatctactgggcgctcaaccacaattcgcttcgacaatctccctgcgcgcccatcatccgcctgcgctccatgcagaacttcctgaggtcgcgcttccggacgcacaccgccccgccgcctccctcgtccaccaacgaggcggcactgggggcattcaaccccaagctgatcaagctaacaccgaaacagtatagagctcaggcctcttcgcattatctctactagtgtgatactaagctaaacttgatatacatatatacacatttatatacacgcatatatagtatattttttacctacgaccccaccccccccctgacccgtcgatgccctcttagtaccctctagtatcgaactccgaacccgaactttgacccaaccgaacgaaactatctagatgtttttcaaaagctctacgcaacaattgcataatacgaaagatacatgctacatatacacatatatagagtacatactaccttgcatagcagtgttagtcgacgcttatttacacgatgttgtgcgcctgaagctatgcaataaggacaccggagtcctgccgcaactcttgcctataacgaggatagcactggtaacgaaagcaagaaaaaaaaaaggaaaaaaaatacaaaaataacgaaacccttctagtgacttgttcgaattgttgtttagtcttttaagctgaaatattgtactatgttccttctcatagataagcaataagtgaacgctttaagccaagttaaacaaacggaaaacgaatcaaactaaactaaaactcgatctaaaacttttaaacgatttaaacgtaaactcgaaagcatacctaacgaaacattaataattatatacatacgcgactacatacaaataacaactaacaagtgaaaactaaaaacaaaaaatgaatgtaaatgtgagcaaaaaaacaaaaggataacatttagtattgtatacatattcttcgacttaattctttatacactttttctaaccatttttaatatcgttcagtaaactgaacacggtgtatagggcaattcaagctgctggatatattcgcgtttcagatgccagagccacccaaaggatcggactctggatcgggtttcatttcactccattcagtggcgaccgtttcctaatttgccaaacttttgtacatgctccgctgcgagcgactctctccttactccacctggtttttcgttcaatccttgga

SEQ ID NO: 170 - DNA, 1638 bp, Drosophila
atgaacagggacaatctgcagcagtggtgggagaactcgtatcggcgccaacatccagagcccaccgatgacctcggcctggactccgcggagctgcatctcgccctccaggagcccaaccagctgcccgcggactacgactatggcaactttagtctaggcaatccgtatgacgtggactcagagcactccatttccccgctgacgctgctcctgctcgctgttagctatggcctggtggttttcggcggcgtcgtgggcaactccacgctcgttctgaccctctgctccgcctcttcggtgcgtttgcgtaacccgctgctgctggccgtctgcattgccgatctcctggtcaccggcatctccgctccggtcacgctcctcaatctcgcgatgaaccggaggacgcgatcgctgccccttgtgctgtgcaaggtcatacactacgtacaggtcatgcccgtttcggccagcactatttcgtttttcatgctctcccttgaccgctacgccacagtaaagcatccgcgattggcgcagcttcgccagcggcgctacttgcacgtctccctggcgctgctatcctggctcgcctctgccgccatcagcactccctttctgtttgcctacaaaatcatcgccaagtcgatggtggtcaagggcggtggggcggcgaacaccacgccaaacccggtcagcatcagctgcacctccgacctgggcgccaacgccatgttcatgtccttcatcatcttccacaccatcgccgtgttcgtgttgcctggcattggtgtgctactcaaccactacggcgtccgacgcaagctctgcgccctgtcgctaacggctcgagctgcccatggagagctgccgctgcccattcccatcctgcgacgccagacccacatggtcattgtgacgggctgccccaacgcccagcaagcggcctgtggtgggggcaccacggcggacgacacctcgaacgggaacggcacgggcaccggtggcggtcccatggccgtcagtccgggcgacatacagcttcacacactgcagccgcgccagccaggctctgccggatcggccctcgaaccgggctcctaccgctctagcaatcccatatcacccagggccatgagggagattcgcgcccactcgcagcgccagcgcatcaaccgagcaggcaggggaccagcgacacccggcatcccactgccccaaacctccacgctgcggtcgcgaaggcacctggctaacatgctcatcgcctcggccgtgatcttcattgcctgctgggcaccgcacgtcttctgcatcttctacaagaacttcggcaacaatcagcagtgcagccagacctctgtttacttcagccttctgctaggctacttctactcggccatcagtccggtgatctactgggcgctcaaccacaattcgcttcgacaatctccctgcgcgcccatcatccgcctgcgctccatgcagaacttcctgaggtcgcgcttccggacgcacaccgccccgccgcctccctcgtccaccaacgaggcggcactgggggcattcaaccccaagctgatcaagctaacaccgaaacagtatagagctcaggcctcttcgcattatctctactag

SEQ ID NO: 171 - protein, 545 aa, Drosophila
MNRDNLQQWWENSYRRQHPEPTDDLGLDSAELHLALQEPNQLPADYDYGNFSLGNPYDVDSEHSISPLTLLLLAVSYGLVVFGGVVGNSTLVLTLCSASSVRLRNPLLLAVCIADLLVTGISAPVTLLNLAMNRRTRSLPLVLCKVIHYVQVMPVSASTISFFMLSLDRYATVKHPRLAQLRQRRYLHVSLALLSWLASAAISTPFLFAYKIIAKSMVVKGGGAANTTPNPVSISCTSDLGANAMFMSFIIFHTIAVFVLPGIGVLLNHYGVRRKLCALSLTARAAHGELPLPIPILRRQTHMVIVTGCPNAQQAACGGGTTADDTSNGNGTGTGGGPMAVSPGDIQLHTLQPRQPGSAGSALEPGSYRSSNPISPRAMREIRAHSQRQRINRAGRGPATPGIPLPQTSTLRSRRHLANMLIASAVIFIACWAPHVFCIFYKNFGNNQQCSQTSVYFSLLLGYFYSAISPVIYWALNHNSLRQSPCAPIIRLRSMQNFLRSRFRTHTAPPPPSSTNEAALGAFNPKLIKLTPKQYRAQASSHYLY

SEQ ID NO: 172 - DNA, 7112 bp, Drosophila
gaatgataactaattcaataaaactacagatttcaataactaaagcatacatgtatatgtatctatgtatctatgactatgtatctcgaatcctccgctgaaactctaaactattcccatgcagtttcttttccttcgtatcgagtttcagagcacggcttgtagtgttgcacgtttttcgtattttttggcagctctggctggtttttttcattttccttttttttttgtactcccatttcctgtcaccctgcccggtgtaattaaaaaagtttttctcgacatttgcttgccatgtgaggctccaggaacaaatgcgttacattgtggaccatccgattgtaaaataaattttaagtgcaatacgaagtgcaaactcagccgtaacaataagatttttgcaataatatttaacttttaattgtaactttggtaaagtcaatgttttctttttccaagttggccaataaaaagagcataaagcaaagcgaaaactttagtgcgtacttttattacaacattaacttcatgctatatattttatttaaatattttggcttttctatccattgtttttcagttaatatcttaaacaaacaatttttgatgcactacaaatgctgttgattttaataaacgatttatagcttacatggattattagctatgtacatataattacgaatatttttaataaagggcatacttaataaattgaaattctggaaaacactcatttatttaacactagcaaattagcgcacaaataatgtgcaaagttcgttaatctttaaagtgtatttgtgaccacagcacaattaaacggtggtccgaaattctatatcttctaattccgcattgtttttttttttttgtgaatttttcaggtaacctccttgttattttggtggtcacattatcacgacgactgcgctcaataaccaactttttcctcgccaacttggcgtttgccgacttctgtgttggactcttttgtgtgatgcagaatctgtccatctatctgatagaaaggtgagtgacaattggcaaaaacaacattatttcagtattaaattaacgtttcatcatgcacgagcggagctgcaaaattctcggaaagcatatacgaagaatacgtgaactaacttcactgtaaagttgccaatagtttttaatgtccgttttcatacgcaaaaaatttaagtgaagcatttaagtgaagcatttatagaaaagtttttagttatagtaggttaaaaattaacacaaaagttaaagtagcgtttcagctagtacagatagtagaatgttatgtggtcgattaaatttatttatttatcagctgcagaatgtggctgaaacggtatctgagtgcatacgtatgtatgcatgtgcctcgaaaacaaagccccaaaaaaaagtttcaactttcaaccgtgaaacatttacgccggctgtcacataaaggaaactaaaactccgcaggcgtcactttcacttcaggcttttcaggcttttatccccacgctccgctttcactccaatcatgtttatttgcattgtgtttccttaactttcccaaaaacacgtcgcagtgacgtgttcacttaaaataaagcgtggagtgctgcttgaaaattcaaacaaaaagaagcctttttcagatttgcagggcaaattaaaaaagtattttgacaaatgagtttggcttacagtttctataagttatttaatttaaaattttagtcgcagtgtcagaaataaataatgcttcattaatttaaatttgtgaaatgcatgtgtttaatatgtgtttaattaaaagctatgttctatacatttagaaaaaaaagtaattacctatctcattagaattcttgaaatgaccatttatttatgcacttaataataaacagacataatgatttatttgcattcccgatgttaaatcctgaaattggtttgcatattttccatttcattttctaatatgctttttgtggccaaagaactaaattattgagatgacccatctgtgtttggcataattttagctaaattatgcgcacaacttgacgcccaccagaaatcatatgcaaaatgagatgagattacgaaaaatcataatttatgcatttataatttatatgtgcggcatacggctgccagtgacaatttaatttaatgattataaacatcaagtcgttttaagaaagtttttagttcattatgttaaggaatgatttgtcccttttaaagagagaaattgaatcaccaggcaaatggggaatctttttaagaaacgcattatccaaaatcttggcgacaaccttcaggattattatgtttattatagtattattgggcacatttaaacgcatgagtgcgaaattacgtggcattgctaataacgaggcacaaatgcggttttcgaatgtaatttcagccgaaatagtaataaaaaggaaaaagctttgcgcctcataaaatactaaagacaccttaatgtcgcattagttttggcgggcgtgtcataacattttatgtggcttgtgctaaatttggctctgccaccaatattgccaagtatatgctctttaaagagcgaaacttttgcccataaataattatttatgtcctttcagctgggtctttggcgagttcctctgccgcatgtaccagtttgtccactccctgagctacacggcctccattttcatcctggttgtcatctgtatggagcgctactttgccatcgtacaccccattacctgcaaacagatcctaactgcggctcgtctgagggtaagttctaaccataaacctcatattcacggccagtaataggcaagtatgcattttaaatgaggtctatgtgtatgtgccctgcttttttcaattcccattttgatgggtcaaaagcggaggaaatctgtttatgtattgtattttgagacattctcgcaactttaataacttcatttgaatacaatttgcaagctaatgaaacttattagaccaagcccggagactcatgcaaattaaccggcagaacagaaccgactcgaaaggcttaataagccgtgggcataactttgtggccgggaaaacttttccgcactcgaagggtgaagtggagggagcgcagccaaagggttgaaccacatagcccggttgtttcatcacagccagacaaaaaatacgtttcggtaatgacgattgcactaattaaactacaagagacataaagacaacgaaatgggctatccattaacatgcaaattcagtgtgttcattcgcaatttaacaaattgtttgcgtgtttggcagccgagcagacaaaacaaaacgtcaatgcgtgtttttttttttgcagatggtcattgtcacagtttggattacatcggcagtttactccacgcccaagtttgttttcagcaagaccattaagaacatccacacgcaggacgggcaggaggaggagatatgtgtcctggaccgtgagatgttcaactccaagttgctggacatgattaactttgtgcttctctacgttatgccgctcttggtgatgacggtaagtgtaacaaatgatacgtagcttgaagttaataattatgtttaaccaatccttggataggatgttcataaattcattttcaatccaaaagtgtttcctagtcacgttacctagcattgagcagactataattaataattaaatgtatttttttgaattgcttattaaagtgattaattatatcaataacaactatctctctaatgagatagaatataaataattttgggtacataataaataatctatgaaatgatttttcttcgtctgttaaaaaagtgattaatggaagtgtagatttccctttatttttttaacgactccatttttcaatttcttctgagaaatttgataagaattgagaagctttttgcataaaatcgccccttgttccgcaatgaaatttgaataatgaatttaacgaacccatttgcattgcaggtgctgtacagcaaaatcgccatcgccttgtggcgcagttcgcgcggcctcacgccgcatgtggtgcagcatcagcatcagcagccgcagcagccatcctgccaggacattggcatgggtatgcacaacagcatgtaccatcaccatccgcatcatcatcaccaccaccaccagcatcaccagctgcaatcggcggcttcgtcggcaggagtggtgggagtgggtttgggtggtggtggtgggggcggtcctggtccgtcactcgcttccggcggcagcagcaccacgtccttgtcccgcaaacagagcagtaaatatgagaagcgcggcgtcagcatcacggagagccaggtgagctgccaggagaacactgcatcagaaaaatcgccggttgagcacggaggagtagccttaaaagcctaacaatagcaataaaccgaaagtggagtcgaacctttgttccctaattggccagaacggctttaacttcgattgagtccgcacgtgctgtgtggtaaataatgttttttgaaaatcacatcgctatcggagcactaatttattagatacaccatttgtcggcctggccaagttggcagtcgtaaaaactttacccgtagctgttactcccgcactttcgccgggccaagtggcacggtgctcggagcaggtgtcaattcacattaaggccatcgcaggaccatgccacaagctcggccaccgatgtgacacctggagtgtggagtggtggagcgaagtgaccaccggcacagggcgaaactgcaagtgcgaggccaaagttatggcaaaagtgtttttttttttccattatcggtggccggacagcaggttcaattggtcgggtgcaccatggcgtatttcttatttcttatttcgagctcgacagcagctttgccacacaaactggcacacacatcattgttcttgatcagcatcagcagctcactttgtcaataaaagccggcggataaaaatcgagaatttgtgacacgatgacattcggaaaagttgtgcaactgccgcagattgaaaattggtaaacaccaaaggcaaggcccttgaattttttaatattcctcgaagtatcaaatgtcaggggagcactggttcgatttcggtatgttttccgttttaaaagtcacaaaaatggaagtttggtaggaaaaacaatggcgggaacacctttataaaacttttacataactttagtttacgctgttccttaacttatgaccccgatatacacagataacaacctaactatctttctgttgaactcttttctctctctctacctttcgtttgatcaataaaactctgtgctctccccctctactaactccccaattataacaacaaccacacacaatcccacaccacaaattagctcgataattgcaaggtaggttgtaatcgaatatcaaaatcgatatgataatgttcaacaactgttgcggccagcgacctaatgccattacacctgttaatccgcacaggtgtccctggaggccgatcgtcccattgtcagtgcctgccgcaagacgagcttctaccaccacggccacgcccatcaccagcgggcgggcaacgcctcagtgggcggtggcagcggcggagccggggccggagccacccacatgtcccactcgtccagcaacgtcctacgcgcccggcgcggcgttgtccgcatgctgataatattcgtgctgacattcgccctctgcaatctgccgtatcatgcccgcaaaatgtggcagtactggtgagtagtcccttcgtccacccaccacccataatcacaatccaatgcgaatcggaatcccaatccctatccctatcccttaccgcaggccattcatcagcccacacggactgagtgtaaacaatattttatggtatattgcaccggcaatcggcgggaatttgcatagtcctccgttggacgggaaattaacatctgcgagtgggcagataagctctagatggcttcctgctggaatcgaggctagtaaacaattaagtcatcaatggacagagctggagctgcagccagctttgccgctggcctaaatgatttgaaagcggtcttccgttttccaatcccactcccttcccaaagacgccagtttcgctttcttctcgcctttcaaaagcggtcgccaagaaaagtccgttttagccagccctttggctatcagttccgcttccggtggagcactttcgaataggtggacggaccgcttagtttgctttgaattcgggcaatttggtttttccggctggcgggtgtggtgggcgtataacttgataagtgagtgggcggtggaagtgtttttgtttgctaaatcgaggaggagttaattgctccctgggtagaattaaaaacgtgcacttaagctgctgactgctgtaaattggaaataaaataaaagtcacagaaatgtcctttaagcgaaagtcgaaagacaaacgattgattgaagatgggaaaagtcatcaagtgtgaaaatctggagacattggcaattttggcacgtaagagaaacgtttttattttgaacttttcatacagattctactaaaccaaacgtttttgagtcaattgtaaattgtaaagcattttacatgccgatgtgcaataaatccaatttaatgttcataagttcatgtttttggtgaataactactgaaataaatatcgatctctagttctcattagtgcaaatattcagtgtaattttgtaagaaaatacttcgctgcagatttgcaacgttgcacttttggcaaacgcaacgaaaacgaaaatgtttttgaatttttgttcgagcactcaatttgcacaattgtaaaacgaatggcggacaaataaatataaataatatctggccaaatacaagagaaatggatttccacatcgccacttttcccgcagtgccataattgagatttatgtctagcccggaatgggcagcgagacttgtttacttgtttgaactttcagcttttatttatttgaagaattggttgcccccagggatattggtattgttaggtggaattgaaagtgtt

SEQ ID NO: 173 - DNA, 1437 bp, Drosophila
atgcagaatctgtccatctatctgatagaaagctgggtctttggcgagttcctctgccgcatgtaccagtttgtccactccctgagctacacggcctccattttcatcctggttgtcatctgtatggagcgctactttgccatcgtacaccccattacctgcaaacagatcctaactgcggctcgtctgaggatggtcattgtcacagtttggattacatcggcagtttactccacgcccaagtttgttttcagcaagaccattaagaacatccacacgcaggacgggcaggaggaggagatatgtgtcctggaccgtgagatgttcaactccaagttgctggacatgattaactttgtgcttctctacgttatgccgctcttggtgatgacggtgctgtacagcaaaatcgccatcgccttgtggcgcagttcgcgcggcctcacgccgcatgtggtgcagcatcagcatcagcagccgcagcagccatcctgccaggacattggcatgggtatgcacaacagcatgtaccatcaccatccgcatcatcatcaccaccaccaccagcatcaccagctgcaatcggcggcttcgtcggcaggagtggtgggagtgggtttgggtggtggtggtgggggcggtcctggtccgtcactcgcttccggcggcagcagcaccacgtccttgtcccgcaaacagagcagtaaatatgagaagcgcggcgtcagcatcacggagagccagttggcagtcgtaaaaactttacccgtagctgttactcccgcactttcgccgggccaagtggcacggtgctcggagcaggtgtcaattcacattaaggccatcgcaggaccatgccacaagctcggccaccgatgtgacacctggagtgtggagtggtggagcgaagtgaccaccggcacagggcgaaactgcaagtgcgaggccaaagtgtccctggaggccgatcgtcccattgtcagtgcctgccgcaagacgagcttctaccaccacggccacgcccatcaccagcgggcgggcaacgcctcagtgggcggtggcagcggcggagccggggccggagccacccacatgtcccactcgtccagcaacgtcctacgcgcccggcgcggcgttgtccgcatgctgataatattcgtgctgacattcgccctctgcaatctgccgtatcatgcccgcaaaatgtggcagtactggccattcatcagcccacacggactgagtgtaaacaatattttatggtatattgcaccggcaatcggcgggaatttgcatagtcctccgttggacgggaaattaacatctgcgagtgggcagataagctctagatggcttcctgctggaatcgaggctagtaaacaattaagtcatcaatggacagagctggagctgcagccagctttgccgctggcctaa

SEQ ID NO: 174 - protein, 478 aa, Drosophila
MQNLSIYLIESWVFGEFLCRMYQFVHSLSYTASIFILVVICMERYFAIVHPITCKQILTAARLRMVIVTVWITSAVYSTPKFVFSKTIKNIHTQDGQEEEICVLDREMFNSKLLDMINFVLLYVMPLLVMTVLYSKIAIALWRSSRGLTPHVVQHQHQQPQQPSCQDIGMGMHNSMYHHHPHHHHHHHQHHQLQSAASSAGVVGVGLGGGGGGGPGPSLASGGSSTTSLSRKQSSKYEKRGVSITESQLAVVKTLPVAVTPALSPGQVARCSEQVSIHIKAIAGPCHKLGHRCDTWSVEWWSEVTTGTGRNCKCEAKVSLEADRPIVSACRKTSFYHHGHAHHQRAGNASVGGGSGGAGAGATHMSHSSSNVLRARRGVVRMLIIFVLTFALCNLPYHARKMWQYWPFISPHGLSVNNILWYIAPAIGGNLHSPPLDGKLTSASGQISSRWLPAGIEASKQLSHQWTELELQPALPLA

SEQ ID NO: 175 - DNA, 17847 bp, Drosophila
ccttcgacttgagcggacagttgaggttctcgaactaattgcaaaattgtcaatgatttattcagttggcaattaaggtgccaactaacggtgtggctggcacggctatatcgatttgaaaatattcaataatcccggagccttgataagctcatcaaacatgcacatggccatcagcaggggggggcaagtttgtatttagagccaagtgtgtttggtgaaggggggttagctgtatatttcagggtttcccctttttttgtcgagcggtttgggggggggttttgcgaggggacacaaaagtacaagttgctatggatcaagctcaaggcgtggcagttgggcattagctctatggtggagcacggcaaccaagcgaacaaaggtcaactcgacaagtgagttaaatgacaaggacctcaccttgccttccttgggcttcggctttggctttggcccgtgcgtgtttgcatgtttggctcgatgaggcgacgcgaccccaaaaatgaaactcaactttggctttgactgcggctcgggattgtggcgtgcaagcattatggcctttcgctttcaaaacaatgcccccatcctgtttcccggttggcctagtggcacttgctccttgttgttggtttttcgcattgcccttggccaattgcgagtgaattttgatgttttgactggccattcctggggccatttgacaactctataaaaccggtgtccttaagcccgccctcgtccttgcgcccaacccccaattaccgtccaactaccacccacctacaccccgctacacccacccacaaagtaaacgtaattgcccggagagtttcgcgactttcgacttggccagcaaactgaaaaagcgaaacttcaaaaaacccgacttgacttggcaactggaaaagtggaaaagcggaagcacgagctttcccaccgaaaagctctcgtgctctaagctttcgtcctggcgaggcgaaaacgtaaatgtcagtcatggagttccagtcgtcggatacatgtggaacacaacgaacacagcaggagcctctcgcgtctcatcccccgaatacaatgcgaaaaagtctgtacaaaaaatagacaaataaggagcaggagcgaaaacaccactctgtgcataagatataactcccgcagaactgaatacctgcaaaaagaaatacgcgttaaatggaattacggtgcgggaattgataaagtgaagtgtgttacagctagaaagcaagtgaaataaaacgaatacattaataattcatgcccctcatagtcagaagcttactagtttgataaggaattcaacgtaaatctgatatagtaatgtagaaaagttgtacaaagtaatatacatagcatatagcatatagcacagttacacagaacacaccgcaaactcaaacaaagttgacaaaaaaaaagctcacgcccctcacatctcagttttttctcgaattatttgtgaaagtgcaacaaacatatataaaaaataaaaaagaaaagggaggagagagcacagcaaaaaaaggcagtgacagcaggacctgcaaaggaattgccatcatttggggattacggaattatcgggatccgttctcattaaaatggatttaaggcaatgccgatgtgctgagctgcatttgtgcatgggattatcgattgtaatgcgcagtcatcaaattatgtttgaacaacgccgccgcgacagcgataatagcaacaataacaacaacaacaacaaccaaatcaacaacaaacactgatttggcccctgaccccctttggcagcaccccctccatccaacaccccctacgaccctgcccaagcaaaaggagcagcgaaaaagaagaagcgtcttatgaaacaattgaagcaccggccaaaggagcaaaggagcagacaaagacagagacaaaaacatcggcaaaggataaaacggaggccgagaagaagaggaagcagtagtagcaaagcaggaaacaacaacaacaacaaccgcaacatcgcatttttaaacggcaatacgcaaagtaagtgaagtgtaaagtgagcgagatggcaatagaaaggtgtagagtgccgcgaagagaggcggagagaatacacttgcaaaaatgtgagcagctaattcccagggatgttaaaaaaaattaaaccctcatggttcaaagattctaggagatggacaagtgatgaatggtcagtggaaatatatgtatgttttaagccaagtgaaatcaaaatgatttgagaagtacaaataaaagaaagaaaggaaagaatgatatatgatatttattggttgtagtacaggaaaataatagttaaaatgatatcccggattgatggtcattacaatgatcgtaccacaaaactctttctaactcaaattaaattgttaaaattatttttcaatacaaatttgatatatttttgttttttcgccgacaagatgcatagatctttcatagaatctgaaatctatatcttttttatattgcttttgagaagagtaaaccgatcatcatctacgatcactcctttttgttctgtgtaggtatgaagagagcaggtgggaaggcagtgaagtgaagtgaagcatttgtcgcatttgtgcagaattcccgacgtaattaatgtttaaagtctgtgtgtgtgtatgtgtgcgaaggtttgtaaactaggtcactaggaagttagccccttgacgaccatcccctctcatcagcgcctcttcagcggcaactctacgtcaaaggtgtcaactcgccaaatctgcaaccacaccttagttaagtgagccaccccgtagccaccaaaattatccacagcaccaccaccttttattcgtccttaacacaccgccatgattaacgcgcctcagtgcgattaactggcaaacaaatttggagtgacgctgcggcgatgtacatacatacatatatgtatgcatgtttgtgctaaaccgacagcatttccattcaataacacacgcggctcgtatgcaaacactgtaaaaaggttttatgctaaaaaagacgccgtatttgtgcatgaaaaactgtcattcatcatccaaccaacacaaataaccggtaatggcatcgccacattatggctttgtattttttacatcctcaaacacaaaaaaactttagttgatttctgacttgcatcgcattcatcacccactaaagtcgagcaatcaatcctcaaaatacgtatacgcactgttagttcagttgattaataggctaattatgaaggaaactgaaaggaaacactaaatcaataaatcctggcaaattagcatcagtatatatttgtgttagtgcaaacatttaagttttctatcaattttaaatacaaatatgttcagaattaagatatatttcaaagggaactatgctttgtttaattaagatttaaggttttataactataaaagccttcaaaatgtgccatctattttatattcacttacaagcagatttcaatcaagaccactctttaatatgatatattatgtctagaacaaccgagaaggcactcttaaattaaatattttagtaccgtaataaattatgaaacgtgctgacggtaaaatatataatacaattcatactttaagttatattttttttttgccctatatggttttacgtatcggtgtgtatgtgagtacctcgcacacgcaggacatagagataaaaaggcttctcccacataaaagttctattctgtttttttttttttatagaaaaatattgctggcaggagtttagaacattgccaaaggggatgcggacagatgaaggggcgggggcgtggcgggtaaaagccataaaactcaggcgccgaagcgcaaaatgcccttgccctgaacaaaaagaagaaattgaacagcaacaaccaacaacaaaaacaaagaagaacaagagcaaataaaatacaaactgcttatttatttatttgtttcgacaaatctcaattgaaacaaagcttaaaagcttcgaaatcaaaacttaaatagaaaccacacagacatccatccagacgaataaaacgaaaacgatagagcgcgagacaaagagacaattactattaaatccaagttcaattcggtccgcaaacaattgaatttgttgcagatttgatttggcttcatgtggattgcgataactattttcctgggattagtatgggattggattcattggcccgaccgcagtttgcttcctaatgagatttgcttaattaaaatgaaattcaataactggaattccaatgaatttaaatgttagagaaaaactctaattcggacttttgtggctagccattatttgcagcaagggggacataaaaagcatttggctttcgtttggattagtcagcaaggtcaaatctcgaaactgacctaagctaatgcaaaatgacttttcctgtcaatcacaatctatatttaattcaagcgaaattctctgccacatttcttgcgctataaatcgcagtacccattatagcatatcaacaaccaaattaagacgaaagtacaataaaatgcaactaatttcagttttaataatggatttgctggcggcttatttttgtttcaaatttggttattttctttagaaatgtgcgcatacattaagacgaacacaaaaaccagctttggctcaatctcttaaacctttaaaacgttatatgtacgcacatatttatgtacgaacaaatgaaggaaaatctcaagcctaattccgcattaagctgcaaggaaacacataacccaaaagtatgcaacataaataaaatttaaatcagcacgtttatgaagtggattatttgaactgaaatgcttattcaacgttattagatgagatttatggccaggagagcatttgaattggcagattattcgggccaaccaagtaatggccactatatcaaacaaatcagttatccttcaattgcaaaatacacagtgcagacaaatagtttaaactgtcttagtggtaatcaaaatcaactttaattatcaactaatgtatgtgtattttacgaaacaaaagtgcattatgcatgaacgaatgatagcaatatttttcaatataaaagcttacgattgttttccttttgttatcaattatctatcacactccacagacatactcctagatcataataataagttatataaatatagcatagattttgaaaggttaaaaggttttctccccaccactccctctaataatattgtatataataaaatatatatacaaatgtatttcataatttcattgccatccaattccgcatagtatctggtataccccatctgcagaaagacaccgaagtgtataaattgcttacgtttgcccatgtagtcataaaaattgctttggcacataaaacgaagcttgacgctcgcttttggttttggttttggttttggcctggtctagtctggtttggtttcatttggccccttaccgttcttgtttcctttggtttccatcgctggtgggcttgtttttttgcgagagtcctggccgtgtccttcttatatttctatttctatttgtatttgtatttgtatttgtattccccgatttgtattttgttcgctcgccaattcggtaatcacatttcaagcgttttattcgtcctgatttcatacgattgctgattcaagtttctgtttgtggtccttgccttgcaggatatgacaagtgatggtgctgttacgttttggatatttttgctttgtttaatcgcctcgccgcacctgcaagggggcgtggccgggaggcccgatgaactgcacatcggcggcatctttccgatagccggcaaaggaggatggcagggcggccaggcgtgtatgcctgccgcaagactggcgttggatgatgtcaacaagcagccaaatctgctgccgggcttcaagctcatcctgcacagcaacgacagtgaggtgagtagtcagtacactgaaaaaaaaacgatatatacctaaggatattttgaatgtaatgcgatgcaatagtcctacagtccaagttcgatacgaaaatagttttttatgtttcctcttaagctggctttaataagaataaacatttattgaagcttttgaactttcttataattttcataggtaactaatatatacaatatattacattaaatacccaataagtatccaataaacttcgaagcaacacagaacttgtttgcaacacgattaatatcactgcaaataatatcctgaccaaaaacccctcctgatgcactgagttctgtttaagccttctgttcacgaagcattttcgctcagtgcactagtaagttggaaagcgataagccctacttatatgcagcccctgctgcctcctctgctgccatgccacatacccttgggtgccacttattttgtttcgtttttgtttctgctcactgatgagtagtggagtgctggctgagcgctggcattcattagcatatttctctaggggatcaggctggggctggggctggagctgggcactgttaacaaaggacaaacagttttattatgccgcattaaagggtattgctgcgcgtgtgttccacaaattgaattcgccgcacaatccgccgcatgtccaacaatatttggcaatgcctcggcttaatgactgcacataaattgcgattgagattcgactggagcacgttcgaaacgttaccaacagcaattatattggctgagttcggttaatcgggcttttatgtgcgtgattcgtaattgataaagggtatttagcattaagaaaaatgtgtgtatatctcgaacaaggtcgcccaataaatgtcgcccggtgttcattaaatcataaatgtatttacatttattcgtgtagtgcaacgctgtaagtttaattatttcaatgcgaaaatctctcatttcccagaaagtttctatgagatcaataagtaaaagtttttgctataaacttcgaacttggttttttgcaatcaaaagttttacgcattttatctttaatgccagcagcagcacgaactgaacttctgcacaaagcttttcttgaataaatcggtataatcaaagtgaacacagtattgatcatattttttttattgatccttatataaaattgtgaaatttttgcattttgtagctaacttaaagagcgcggaatatgtttttagctggcatatttgttctaaatggaaaaaatagagcatgggcacgcaataaatcaacatttcaatagtatccagttgtctggatgctgtaacttctgttggcttttagagaaccagctattaaacaaatacccgccctccaaacggtcatgcatcataataaatggccagtaaccgatgtagtttccgttttccagttcccaaccaagttgcgcgctatcaatgccccttggcgcgtatctctaatacaatacatataaaaccaaaaccaaaactatctttatacattttcatatttcgcacatattttttgtttttttgtgaatttcgcattttaagggtctgcggtacagttgttgcggtttccactacttcggcggctgttttgggcctgcctatttttaagcgcgaacctcattagttttaagtgagcgaaagcttaactacttgttttgagttttgaatgaggtcactttgccccggccgagccgtagctcatcatttgagttatttttattcaaggctgccaggagggacagtcactactactacatacatatatcctacgaacatatacgaacatatacacgcccatttacgagccagatacggacatatagataggaacagagccggagaggtaaaccaagtcctatccctggtcatatctgttcctatctggcgtggtctggtctggtctggtctggttagttcagttcagttcagttcgcttcgcttcgctggactgagcctgagagccaggcgcgttatgtttgtggcttaggcaaacagcttccgttaaatgctgcataattagttgccatctccaggtcccacagccaccttctcctccggcacatccacatccacacttactcccacaacgcaacgcaccaccccatcccgcccacatccacgtcacttggcaagcgacaaggggcaaaggtcgcacgcaatgtttgcctttgccgctgccttttgcttgacctactttgatgtgtgaaatgtcccaaagaattctgcacaaaagcactgagagttgaacaaaaaaatgtataaacaaggcaggttggttatcctgtaataagcgaaatccctagtcggcttaagtccaagatcacacagaacaggtgaatacttttgtggcgaatttcgaatcgaactttgattttttaatggccaaatataggtgctgaaaaatcgtattattgcatttgcaaagctgccactttctatcggctaagtgccttcatgcgaaccactgaaatggcttaaaccggttgtcaagctttaggaataagccggaaattgatttaacagcgttgggataaaaatatgtgctcctaaaaggtttttgctttttcttttttaattaaagtttaattaaatcacaacaaagcattcaattatttaaactcacattttcaattgcaatacagaaaaggtaaatataatggctaaggtaatcaaaaattatataaataggcatctacagaatctgcgagttttaatttaaattgaatattgttttgtacaatgtaataatattcctaaatgtgctttgtattatagaagaacattctactaataaatcatttagctattttttggttaatattaaaagtactatagtactatgtactatcagttttatgctgcttagttgttctataaaatcagtatgcctctgcccacgaaaagggaaactattaaattagagcggacatcgtggcatgcctcggtacccaaagccaaagcacacacccagatctgaatagatggagtagtacgaacaggataatacttatgcataaacagggactggacatgagaaggaaatgaaaggaaaaaaaaaaccaattagaatggttgtttacacgcaaaccaagtaagaaatatgaaaattgtcgtcagaatggggtttgggccaaagtaaaggaaacgccgaacagggaaacgagtttgccatgtaaatgaatgaatgcgagaatgaataactgaatgaatgaatcatttatgtggccaatgtggatggatacacgtatgcccacgtatgtatgtatgtatattcacaacttcggcacaagggaaagggacacaccttcgtgaattattcattgtcatgaatgaatcttgtttaattgataaatgctatgacatggggattaatgaaaagcataatggaaaaatatcaaccaggtggcacataaattaggcaggacttggaatatggaaatttaactagctacataaatattgctacaaattcgtataataaatcacgctaaatgcaacaattaacatgcatagtttaaaatttgattgattataattttcaattttctctgccagcaagtttttaattaagcagcttaatttcgtagtttgctatgtcaaatccagcattccatccagttgattaattttcattttcaattatattggcgaaaattggacgagatgacgaaaattccttctgggccagttttgtgcattaaattcaatttaaaagccatgccaatgtcataaacgccccgcatgaatcacaaagccaattaatcatatcaataattatcttccaatgaagacagacacataaataacaggaaattcgctattaataactcctgaagggtcgttgcttagcataatcataatcaatacatcgcgttggccatcaaacgaaacctacatatccgcccatgtttatgaatatttatcgagcaccgacggatgagagtataagtattcttggcaacttggctaattccgctttccccatccccatcccaccattttcattcacagtgtgagcccggtttgggcgccagcgtgatgtacaatctgctctataataaaccgcaaaagctgatgctgttggcaggatgcagcacggtctgcaccactgtagccgaggctgccaaaatgtggaatctaattgtggtaagtgaaatttgcatagcgccagaatggctggaatatatacatacatacttcgaaatactttacctacatgccactgcccctccacagctctgctacggggcctcgagtccggctctttcggatcgcaaacgattccccactctattccgcacccatccatcggccacggtgcacaatccaacgcgcatcaagctgatgaagaaattcggctggtcccgggtggccattctgcagcaggcggaggaggtctttatatcggtaggtaatcggtgctaactaattacatttccatattaacttcgaaaacttttatgaacagaccgtagaggatctcgagaatcgatgcatggaggctggcgttgaaatcgtaactagacaatcatttctatccgatccaacagacgccgtgcgcaatttgcgacgccaggatgcacgcatcattgtgggactcttctatgtggtggccgccaggagggtgctctgcgaaatgtacaaacagcagctatatggccgagctcatgtgtggttctttattggtaaatacaaattatactacttagataccgatatctcatatgcatagatactttcacagagtcttcttgtaactaaactactttttttttaggctggtacgaggacaactggtacgaggtgaatctgaaagcagagggcatcacctgcactgttgaacagatgcgaatagctgccgaaggacatctgacaacggaagcgctcatgtggaatcagaacaatcagacaactatatccggaatgactgcagaggaatttcggttagtactactactctatccattgctaaagtttttgcttcaatgtgccttctttttgcgcagacatcgactgaatcaggcgctaatcgaggagggttacgacattaaccacgatcgctatccggagggatatcaggaggcgccactcgcctacgatgcagtgtggagtgtggctttggctttcaacaagaccatggaacgattgacaaccgggaagaaatctctgagggattttacctatacggacaaggagattgccgatgaaatctacgctgccatgaactccacacaatttctgggtgtatcggtcagtttgtgaaactaatttcataatacttagttagttacttatttttttatttgcagggtgtggtggcattcagttctcagggcgatcgtattgctcttacacagatcgaacagatgatagacggcaagtacgagaagttgggttactacgatactcagttggataacctatcctggttgaatactgaacagtggattggtggcaaggtaagcaaatcagttagcgttgaaaaaacaatcatataatcaaaatgtcggacgatgataaaaatcaaaagaagacaaagcatgtaacgactgaaccgaataagaacggaaatccgtccaaagacgacgttaatacaagaggatcattaacaagcttaagtgagaaaaatgatgaatccaaaaatccatcatcatctgcaagtcttcagcaagctcctaaggtagcaccaaaaccgaaaaagttatcaatttcggatgctggtaaagacacagtaacccaaaaagtcaaagaaaatgaagagccaggattttctaaacaatttgaaaaagaatctattggtgtgcgagcaaatagaaacagcagtgcaacaaaaaaggaaaatgaaaagctattagtaaagaccgtgcccggaaaatctcttataaaagaatctaacgatgaaaatgtggaaccatctagacgcacaaaaagtcagccagttggaaaaaaagtttacgaggaatcttcaacgaggcgagttcgtgagccatttgattcttttgatagggaaaagtacctgtctgatatgatcgattatgatcgatcgtccgaggacgtgccggaaaaaaaactatcttgggaaccagacagtacacttcgacgtcgttttgtcagcaataatgaatatcattctagtcttgaaggtgaggaggaagagatcgatttagattcagttggatcgtcaacaatgcgaggtagctatcgaatgccacagaatgccgaggatgaacgacctgttatcctagctgaaataatcaatatgggaaagttgaaggagctcaaggagcaacgcgaatcaactaacgtatttcgtaacaatcgtagagatgataaaaccattgatgaagtgaagggttccaagatcacaggaaccagcaaacaacatgttgaagaagttaaatataatgaaacagcaagtaatgaagatgatgacaatgcacaggtaaaacatataggtacaatcacaaaaatctttagcattgcgcaaagaatgaaagagaagaaaagctccaaagaaagtgaagaagacgagaataaggacgagaataaagatgtaaaaaaagatgaaaataaagacgatgaacagaaacttcccccggaaccagagatcgaattggaggccaaaaaagcttggacttttccgatcgcagagacatcacctgatatccctggagaaaatcagatcctgcaagaataccaaaaggttaaaattggcaaaagaaacaggaaatacagatgtataggcatcaatacggatataagcagaaaatctaagattaaaacatttatcagcaagtctgcaggtgatgacttagtagtataccatgatggtggaagattgcgagatataggacaaaccactgaaaatcttaagaatcaacgaaagaatcataaacacaaaaccgaaccagatgatatacccgttgatataggacacagcgatgatcgagtaagggaaattggagtgaatactaaaaagttaccaaaaatcataataccaccaattgccgagatgcatgtgcacaaaaatggcaaattaagggacattggaaccagcacagataagccattttggccaatcgatgacggaactgatgtaatctacatgcatcccattaagactgataggaagaaattaaacaaactgattgtggatccaccgccggataatggaccctacaagatgccaaccaaagaagatagacgaacgtactacaaaggttgtgaatatcattttcctggccgaacggaatggcgcaggcttttcttcaacaaaatccatggaaaatacaagctacgccgtccaagtcattggctctacacactagttttttccgttttatatattttgtttgtcattatcttttccatggcctggttcgatttcatcaaagatgacgcttccagaaaggtacccatgataaagatggcacaaccatttattagtttcactcccatcggaccacgaactaatcccaaggcggtatcctttgatcctagaaacagcacagaagtcatggaaaagtacgctggtataatggctcttctggaaaaatacggcgactatggacacaatccgcgttttggaacgtgtactgcgaatgaaaagtttggctatccaagcggcgaaccgtgtgtttttcttaaagttaatcggattattggatttaagaccgaaccctacatcaattccgatgagcttgtcaaagccaagatcgatgaggttgaatttacggccttaaaaaggttattggaaaatacaacaacagaggagggtcatttgaatcgcacttggataacatgccgttcagataaagataagaatgttttgattgaatttcatccagagccggcgataagaacggaatacaccgatattgaagagaaaatcgagtatattgcgaacgagggtaaaaagtcatttttcggcccaaacgatgtgaatcgaatcgtggctcttaagatcaaaaatctcaaagcaaatgaacgtgtccatataaattgcaaaatgtgggctcagaatatacatcataggaaagagggttatggccaagtttcgttttttgtgttattagctacaaatgaaaaccgcgagagggtggaaaaattactccgaaccgactactcattataaaatacataaatataactttctaataaaatgtgttatatgatatatgtatgtattatttataacatctataatccaggttcctcaagatcgcacaattgtcacccatgttctacgcaccgtgtccttgccattatttgtgtgcatgtgcacaatatccagttgtggcatattcgttgccttcgccttgatcatctttaatatatggaataagcatagaaggtaactatttaattggtagtgctcgtgcagaactaactaagggttatataatttctagagtaatacaatcctcgcatcccgtttgcaatacgatcatgttatttggtgtcatcatctgtctaatatctgtcatcttactgggcatcgacggacgctttgtcagccccgaggaatatccaaaggtgcgagttacttaccttaaaagttctcttcatttttattaaagttaatttgatataaaattatccattagatatgtcaagcgcgggcttggttactatccaccggttttacactagcatacggtgctatgttcagcaaggtctggcgtgtgcatcgttttacaacaaaagcaaaaactgacccaaaggtgggtttaaattaaattaactacaactatatattagttgctaatcattttgtggaattgcagaaaaaagtggaaccttggaagctatacaccatggtttcggggctattatcaatagatttagtgatattactctcatggcagatctttgatccgctgcagcgttatctcgaaacattcccactcgaagatccagtatctactactgatgatattaaaatacgtccagagcttgagcattgtgaaagtcaacgcaactccatgtggttgggtatgttgtgataacgatccattatattgtatataatatatttatattattttgcaggtcttgtatacggcttcaaggggctaatcctggtgtttggcctctttttggcgtacgagacgcgctccattaaagtgaaacagatcaacgattcgcgttatgtgggcatgagcatctataacgtggtcgtcctttgcctgataacagctccggtgggcatggtcattgcatcgcaacaggacgcgtcctttgccttcgttgctctagctgtgatattctgttgtttcctaagcatgctgctgatatttgtgccaaaggtcagccactacactgaactaaaagaagtagcacatttgtaatgatctctattcgcacaggtcattgaggttatacgtcatcccaaggataaggccgaatcgaaatacaatcccgattcagccatatcgaaagaggacgaagaacgctatcagaaacttgttaccgaaaacgaggaattgcaacgattaataacacaggtatgctgaattatggtagattatcttaataaaatcgtattttatttaattttgtttaaagattaaattcaactgttcgttgaacgttaatctaaaagtatttcggtcttatcataatttgaacaaaagttaaggattggaatttccagcggccccagtgaattccattcagcatgccggtttcaccttctctaaaataaagtccatttagcgagctgcaatatgaagtattatcaacctcttataaatcaaattttaatttgataattaatttaccttgacaaacatgagtgaaaccaccaaccaccgccatgctcggctgcacaatttttactagattcatcattatcacgatcaaaagttgagaaccttttatttatatggtatcttagggagtccccagctgttccagaatattttcccacccgttccagtttgtataattcagtttcactgtccacttgaaagtcatcaaagtgagcgtatactgtagcgccaggaccatgcttcaattgaatgaaaagttcgtgtggttgttctctagtcattaggtaaagcttctgaagaccgatgaaaaattcgccattcggatcgccaaatccatctttgtaactaaaccacgattggttaaaattaacacttccatctagtcgtctttgaatgacaatccaatctcttgccgtcgttttgcactgggtcacttgaaaaggttcttcttctggcaacattagctggtgaattccatttggactgccactaggacacgtgtgtggtgaactctggcccacttcgaacagcaaagtccataaaaatagtacaaaaaagcacgatttcattgtactcgacatgcgtactgttagaagatcggtggcttactgaagtatctaccatttaaaaggggaacattgggacgcagttttgtggttttgctacctttgaccgcattgcttgatatgcatatattctatttaggtcggcatttaagcaaatggattccaaaaaagtgaatggagactatttaaaagatagaactacatttttattgtttaaatgtttgtttgttttgcttatatttttattgttttataaacattgatttattaattttccgcttgcagaaggaggaaaagattcgagtcctgcgacagcgtctggtggagcggggcgacgccaagggcacagaactgaatggtgcaacaggtgtcgcctccgccgccgttgcaacaacttcgcagcccgcttccctcatcaactcatcagcacatgccacgcccgcagccacactcgcaatcacacaaggtgagtagagtacctggtgcatggaactatgcatcccaaatgccccttagccagttgcatgtggtaatcgatactagttacgttggtttagcttgacgttcttaatcgttatgttctcgattttaactagaaatcttagctctattcgtcggcattgacacaattgattaggaacaacaatataaatggagttcaaaggttatttgcttatgctaacgctatgtaaactcgattttcgcacaaaaaaccaaaggcaatttatcagtttctggaatgtctattgctttgtgtgcatacatatgtatcttaagcacttttgcagtttttgagcttatttatatcttcagcactttagcacttttttaataaatatcactgcttctgcacccttttttcacattttagcaagattattcaaaacatactaatacgtaatatatttatcttacagatactcatgagcatcgtacatgaaaaaacttgtcaatttcctttgcgtgataggtgaattatacaaaagatatgaaatgcaaataatgatgctaacggaaggatggatttaaacaaacacgtacttaaagaactttgtatcaactttaagctgagctaaataagtgaattggtagcagcaattttgtagaataatgaaatatgtattgtaccttaaacgtgtttagcattaatattgaaaacgaagtaattttaacttaaaagaaaacaaaacaaaaattcgacactagcatctaaactaagcgaattgttaggctttaaagttgcaacacagaaaccaaaaaaaattctagcaaatcaagagaattcattacgaaaagatcgtgttaaagttagtaatttttaaatgcaggtagagaagacaaattgttgattttgtgtttagtaaatactgtttttttagttaaacgaattatcctttcgaacctcatttgctcagcgctgtctcctagagctctctagttaattatatctgcgtagatgaaaattccccaaaag

SEQ ID NO: 176 - DNA, 5167 bp, Drosophila
tcatggagttccagtcgtcggatacatgtggaacacaacgaacacagcaggagcctctcgcgtctcatcccccgaatacaatgcgaaaaaaactgaatacctgcaaaaagaaatacgcgttaaatggaattacgcaccccctccatccaacaccccctacgaccctgcccaagcaaaaggagcagcgaaaaagaagaagcgtcttatgaaacaattgaagcaccggccaaaggagcaaaggagcagacaaagacagagacaaaaacatcggcaaaggataaaacggaggccgagaagaagaggaagcagtagtagcaaagcaggaaacaacaacaacaacaaccgcaacatcgcatttttaaacggcaatacgcaaaaaaaatattgctggcaggagtttagaacattgccaaaggggatgcggacagatgaaggggcgggggcgtggcgggatatgacaagtgatggtgctgttacgttttggatatttttgctttgtttaatcgcctcgccgcacctgcaagggggcgtggccgggaggcccgatgaactgcacatcggcggcatctttccgatagccggcaaaggaggatggcagggcggccaggcgtgtatgcctgccgcaagactggcgttggatgatgtcaacaagcagccaaatctgctgccgggcttcaagctcatcctgcacagcaacgacagtgagtgtgagcccggtttgggcgccagcgtgatgtacaatctgctctataataaaccgcaaaagctgatgctgttggcaggatgcagcacggtctgcaccactgtagccgaggctgccaaaatgtggaatctaattgtgctctgctacggggcctcgagtccggctctttcggatcgcaaacgattccccactctattccgcacccatccatcggccacggtgcacaatccaacgcgcatcaagctgatgaagaaattcggctggtcccgggtggccattctgcagcaggcggaggaggtctttatatcgaccgtagaggatctcgagaatcgatgcatggaggctggcgttgaaatcgtaactagacaatcatttctatccgatccaacagacgccgtgcgcaatttgcgacgccaggatgcacgcatcattgtgggactcttctatgtggtggccgccaggagggtgctctgcgaaatgtacaaacagcagctatatggccgagctcatgtgtggttctttattggctggtacgaggacaactggtacgaggtgaatctgaaagcagagggcatcacctgcactgttgaacagatgcgaatagctgccgaaggacatctgacaacggaagcgctcatgtggaatcagaacaatcagacaactatatccggaatgactgcagaggaatttcggttagtactactactctatccattgctaaagtttttgcttcaatgtgccttctttttgcgcagacatcgactgaatcaggcgctaatcgaggagggttacgacattaaccacgatcgctatccggagggatatcaggaggcgccactcgcctacgatgcagtgtggagtgtggctttggctttcaacaagaccatggaacgattgacaaccgggaagaaatctctgagggattttacctatacggacaaggagattgccgatgaaatctacgctgccatgaactccacacaatttctgggtgtatcgggtgtggtggcattcagttctcagggcgatcgtattgctcttacacagatcgaacagatgatagacggcaagtacgagaagttgggttactacgatactcagttggataacctatcctggttgaatactgaacagtggattggtggcaagaagacaaagcatgtaacgactgaaccgaataagaacggaaatccgtccaaagacgacgttaatacaagaggatcattaacaagcttaagtgagaaaaatgatgaatccaaaaatccatcatcatctgcaagtcttcagcaagctcctaaggtagcaccaaaaccgaaaaagttatcaatttcggatgctggtaaagacacagtaacccaaaaagtcaaagaaaatgaagagccaggattttctaaacaatttgaaaaagaatctattggtgtgcgagcaaatagaaacagcagtgcaacaaaaaaggaaaatgaaaagctattagtaaagaccgtgcccggaaaatctcttataaaagaatctaacgatgaaaatgtggaaccatctagacgcacaaaaagtcagccagttggaaaaaaagtttacgaggaatcttcaacgaggcgagttcgtgagccatttgattcttttgatagggaaaagtacctgtctgatatgatcgattatgatcgatcgtccgaggacgtgccggaaaaaaaactatcttgggaaccagacagtacacttcgacgtcgttttgtcagcaataatgaatatcattctagtcttgaaggtgaggaggaagagatcgatttagattcagttggatcgtcaacaatgcgaggtagctatcgaatgccacagaatgccgaggatgaacgacctgttatcctagctgaaataatcaatatgggaaagttgaaggagctcaaggagcaacgcgaatcaactaacgtatttcgtaacaatcgtagagatgataaaaccattgatgaagtgaagggttccaagatcacaggaaccagcaaacaacatgttgaagaagttaaatataatgaaacagcaagtaatgaagatgatgacaatgcacaggtaaaacatataggtacaatcacaaaaatctttagcattgcgcaaagaatgaaagagaagaaaagctccaaagaaagtgaagaagacgagaataaggacgagaataaagatgtaaaaaaagatgaaaataaagacgatgaacagaaacttcccccggaaccagagatcgaattggaggccaaaaaagcttggacttttccgatcgcagagacatcacctgatatccctggagaaaatcagatcctgcaagaataccaaaaggttaaaattggcaaaagaaacaggaaatacagatgtataggcatcaatacggatataagcagaaaatctaagattaaaacatttatcagcaagtctgcaggtgatgacttagtagtataccatgatggtggaagattgcgagatataggacaaaccactgaaaatcttaagaatcaacgaaagaatcataaacacaaaaccgaaccagatgatatacccgttgatataggacacagcgatgatcgagtaagggaaattggagtgaatactaaaaagttaccaaaaatcataataccaccaattgccgagatgcatgtgcacaaaaatggcaaattaagggacattggaaccagcacagataagccattttggccaatcgatgacggaactgatgtaatctacatgcatcccattaagactgataggaagaaattaaacaaactgattgtggatccaccgccggataatggaccctacaagatgccaaccaaagaagatagacgaacgtactacaaaggttgtgaatatcattttcctggccgaacggaatggcgcaggcttttcttcaacaaaatccatggaaaatacaagctacgccgtccaagtcattggctctacacactagttttttccgttttatatattttgtttgtcattatcttttccatggcctggttcgatttcatcaaagatgacgcttccagaaaggtacccatgataaagatggcacaaccatttattagtttcactcccatcggaccacgaactaatcccaaggcggtatcctttgatcctagaaacagcacagaagtcatggaaaagtacgctggtataatggctcttctggaaaaatacggcgactatggacacaatccgcgttttggaacgtgtactgcgaatgaaaagtttggctatccaagcggcgaaccgtgtgtttttcttaaagttaatcggattattggatttaagaccgaaccctacatcaattccgatgagcttgtcaaagccaagatcgatgaggttgaatttacggccttaaaaaggttattggaaaatacaacaacagaggagggtcatttgaatcgcacttggataacatgccgttcagataaagataagaatgttttgattgaatttcatccagagccggcgataagaacggaatacaccgatattgaagagaaaatcgagtatattgcgaacgagggtaaaaagtcatttttcggcccaaacgatgtgaatcgaatcgtggctcttaagatcaaaaatctcaaagcaaatgaacgtgtccatataaattgcaaaatagtaatacaatcctcgcatcccgtttgcaatacgatcatgttatttggtgtcatcatctgtctaatatctgtcatcttactgggcatcgacggacgctttgtcagccccgaggaatatccaaagatctttgatccgctgcagcgttatctcgaaacattcccactcgaagatccagtatctactactgatgatattaaaatacgtccagagcttgagcattgtgaaagtcaacgcaactccatgtggttgggtcttgtatacggcttcaaggggctaatcctggtgtttggcctctttttggcgtacgagacgcgctccattaaagtgaaacagatcaacgattcgcgttatgtgggcatgagcatctataacgtggtcgtcctttgcctgataacagctccggtgggcatggtcattgcatcgcaacaggacgcgtcctttgccttcgttgctctagctgtgatattctgttgtttcctaagcatgctgctgatatttgtgccaaaggtcattgaggttatacgtcatcccaaggataaggccgaatcgaaatacaatcccgattcagccatatcgaaagaggacgaagaacgctatcagaaacttgttaccgaaaacgaggaattgcaacgattaataacacagaaggaggaaaagattcgagtcctgcgacagcgtctggtggagcggggcgacgccaagggcacagaactgaatggtgcaacaggtgtcgcctccgccgccgttgcaacaacttcgcagcccgcttccctcatcaactcatcagcacatgccacgcccgcagccacactcgcaatcacacaaggtgagtag

SEQ ID NO: 177 - protein, 1713 aa, Drosophila
MWNTTNTAGASRVSSPEYNAKKTEYLQKEIRVKWNYAPPPSNTPYDPAQAKGAAKKKKRLMKQLKHRPKEQRSRQRQRQKHRQRIKRRPRRRGSSSSKAGNNNNNNRNIAFLNGNTQKKYCWQEFRTLPKGMRTDEGAGAWRDMTSDGAVTFWIFLLCLIASPHLQGGVAGRPDELHIGGIFPIAGKGGWQGGQACMPAARLALDDVNKQPNLLPGFKLILHSNDSECEPGLGASVMYNLLYNKPQKLMLLAGCSTVCTTVAEAAKMWNLIVLCYGASSPALSDRKRFPTLFRTHPSATVHNPTRIKLMKKFGWSRVAILQQAEEVFISTVEDLENRCMEAGVEIVTRQSFLSDPTDAVRNLRRQDARIIVGLFYVVAARRVLCEMYKQQLYGRAHVWFFIGWYEDNWYEVNLKAEGITCTVEQMRIAAEGHLTTEALMWNQNNQTTISGMTAEEFRLVLLLYPLLKFLLQCAFFLRRHRLNQALIEEGYDINHDRYPEGYQEAPLAYDAVWSVALAFNKTMERLTTGKKSLRDFTYTDKEIADEIYAAMNSTQFLGVSGVVAFSSQGDRIALTQIEQMIDGKYEKLGYYDTQLDNLSWLNTEQWIGGKKTKHVTTEPNKNGNPSKDDVNTRGSLTSLSEKNDESKNPSSSASLQQAPKVAPKPKKLSISDAGKDTVTQKVKENEEPGFSKQFEKESIGVRANRNSSATKKENEKLLVKTVPGKSLIKESNDENVEPSRRTKSQPVGKKVYEESSTRRVREPFDSFDREKYLSDMIDYDRSSEDVPEKKLSWEPDSTLRRRFVSNNEYHSSLEGEEEEIDLDSVGSSTMRGSYRMPQNAEDERPVILAEIINMGKLKELKEQRESTNVFRNNRRDDKTIDEVKGSKITGTSKQHVEEVKYNETASNEDDDNAQVKHIGTITKIFSIAQRMKEKKSSKESEEDENKDENKDVKKDENKDDEQKLPPEPEIELEAKKAWTFPIAETSPDIPGENQILQEYQKVKIGKRNRKYRCIGINTDISRKSKIKTFISKSAGDDLVVYHDGGRLRDIGQTTENLKNQRKNHKHKTEPDDIPVDIGHSDDRVREIGVNTKKLPKIIIPPIAEMHVHKNGKLRDIGTSTDKPFWPIDDGTDVIYMHPIKTDRKKLNKLIVDPPPDNGPYKMPTKEDRRTYYKGCEYHFPGRTEWRRLFFNKIHGKYKLRRPSHWLYTLVFSVLYILFVIIFSMAWFDFIKDDASRKVPMIKMAQPFISFTPIGPRTNPKAVSFDPRNSTEVMEKYAGIMALLEKYGDYGHNPRFGTCTANEKFGYPSGEPCVFLKVNRIIGFKTEPYINSDELVKAKIDEVEFTALKRLLENTTTEEGHLNRTWITCRSDKDKNVLIEFHPEPAIRTEYTDIEEKIEYIANEGKKSFFGPNDVNRIVALKIKNLKANERVHINCKIVIQSSHPVCNTIMLFGVIICLISVILLGIDGRFVSPEEYPKIFDPLQRYLETFPLEDPVSTTDDIKIRPELEHCESQRNSMWLGLVYGFKGLILVFGLFLAYETRSIKVKQINDSRYVGMSIYNVVVLCLITAPVGMVIASQQDASFAFVALAVIFCCFLSMLLIFVPKVIEVIRHPKDKAESKYNPDSAISKEDEERYQKLVTENEELQRLITQKEEKIRVLRQRLVERGDAKGTELNGATGVASAAVATTSQPASLINSSAHATPAATLAITQGE

SEQ ID NO: 178 - DNA, 4463 bp, Drosophila
tgtgggtggttcgcacgcccgccatttccggcgcggcctcggataacgtcctcgattacgccctgccgcccaacacgcccactccgaaggactacgcgcacaagttcctgcccgagggcaaggatgtggtacccggaagctcttacataccgctgcggttgctggtgataaagcgctgaagctgatatatgaatcttgggcggcggcttgccttttgttgttcgaaaacaagttccggcggaatgccgatacccgacacttaatgcccaaccagtagttggctaattggctttaagcttactggttcctagcgctagtctagcaatagtttagttgtttatgttaaggcccaagttcgctaatctaaattaagccaccacatcccggggtccgtgactaagacttccgaccttatcgcatccaataaatccaaaactaagactcagccacatgccgtcgtaatctatgaaatacattcaccaaaaactaagttgtcatctcatttacataaattagaagtcataaatttgaagtgagcggggaactacttggctcgaaacggttagaagctgaattcaaaaccggttaacgtttatctgtcagctgtaatcaaaagcttaaagcttcgcttgtttggtttagtctttgactaagtttggaaagcaggactaaaagcttttatttgccgaaactaaagctcggaggtatttatttattcacaagtaaaatgacaaaacttggaagttctttggtaatgtaatgaacgccaatatttacattcgggttttattgtatttgaaaagtctgatgaatcattatcttgatgactggcccctaatttacttttcatgttctacgcaaggggtatgataactggttgacatggataccaagattagagcttgcagactttataatcatccaacaaacattatggtgcattgtataccatttatgttatgaatgaaagtggttcagataagttacattttattttatctcacacatctaagtttttgtattgctgcacaggaaaataaatcaagattatccacaatagtttaaaagtcaatttataggtactatgtagaatttatttacattttgttgtactaatggtaacttaacttaggtttttaaatactagtactgtttgttgatgaatggcttaggccttgcaaaatcgagtcagtgggcatttgtatagtttgctgatttctcttcttgctcgaattgcaacagagacccaaccaggcccgctggttctctttgttaaatactataaagtaaaggaataaaacaaatccctgtaaagtggctgtcaggcagaataaataggcgaagatccttccgaaatcgaagtatgtacacaatccaaaaatccatgttattcccaaaagaaagaagagcaacacaaacaggccgagttgcttgaagataaggtcacgtttgaacagggctgtatagacactccaggagatgtatcccaccaatattgcattggccaccgtgataaggccaatagggagtatgacgcccagacttaaaccatatccagaaggatagcagaggatgggatagtccattgaggaattattgggtctgtaggaaccgggctccagaaaaaccaccaacaaggtgggtataagtggcaatgtccaggccgccacagccgacattagtatataatgtcgtgggtgattaactccaatgactctcacatatctttgatactgcagaaatccaatgataaacatccagctgaagacaaccaagagtagatattgcatcacggctccaaccagagtacatcgttccgactcagattgttccagctgctccagcaaatggctttgactcaggatcaggaagaagagcaactgaagacccagggcagcacacagattcagcaatatcttcgtggaggctaatgtccggaagctcttaaacacggctgcagttataaaaatcattaggaggcccaacagagaaagggtcaagccgacattggtgattacatctaaggagtgatcatcttcattggtgtccagacctgcctgcattttgctcactcccagtagaaatgtaaactgggtcagatgatccgcatggcagaggatcactgggtgcgatgaggcttccaagctgccaccaccgctggtggatattccatcgctaagccaggtctcatagttccagtaaccacatcctccctcaaattgagtttcattcgcttttgcattacgcaagaaaaatggcaactttccaggtagcttggtatcttacgaaaagattttagattaaaacatatatgctataattttccctcaacccactcaccattcaatcctggtattgttatggatataacattactagttggccgtcgtttgatttcctcttccgtctccacaaagagtgaatctcgagtatagaccttaaaaactaagtaagaggctccctttctcttcagttgggtccatagtttttcgggaataaagaccgcactttctagattcttcatggcccttatatcttcctcattatccgataggtgaagcatttcgaaatgcgacatattgccaccagagaagttcactatcccactcacatttctcacttctggatctacaaagaatactctgagttcgctcgtctttagaacaatgacacccatatcaaacaagggatggaatgtgaactcagtgctgtttgcaaaaatagtggtgtttaactttaaaattgttggactaagctcatccaaataatcctcgaagttgctaaggagtgcattggttgcattagcgtctgctgaaacacgaagggtttcattatctgtagacataactttttggcatatcttcatcaagtcccctacaactgcagcatttctttccggttttttgaccagcgaatcgaatatctccgaaatactgaagacatcggcggcggccagtttctcctgagtttgagtcaggaggttactcagttggctaatcatgtccggagggctcttcacagcgagaaggtttatactcgagctgagttccggtgccgacctacaggtcacgtgatccaagctctgccaaactctattcccattgcgaatttggcacctccgtcggatgggaattccccgttcgttcaggcatagatcccttagattcgccttttgcccaactctcgttttctccacgcgattgattcgcttttccttgccttcatccgtttcgtattccagttcaaagtcctcggccttgcagaatcctcggttgcagtccttgtagggattgtgcgacagctgaccatctgcatccacgcagaggaggaagcgcaagttcttcaggtggcagtagtccagacaccgggccacattcggctgatccagggcgtacagggggggatttgtacctccagatacgagtattatatagccagcaatccaccagagaaacagcagcatactgctatctatttttaactaatttaagcgcaggctgcgatgtcgcactcccgaagctccgcgatcgactgacgaggcggagataaaatgcgagtggcgataaaacgagttttcctctcctcatccctgtaaatagggcctgcaagaattgccactttcctcactgttctagctgggtatttgaattgctggtctacttcgagcagagctcaaggtcaactggttatctggccgacgataagaattgcagcatcttcaaaggtcgaacggtgcgttcttttcaaaatatctttgaatataataagtgaaagtctcgaaaataacacgaacctctttaataatgggtattatttatacacagtagttctgtttactttgatcacattttttatcaagggaacttcctaattaaaaacaaaaaaaaaaaaacgaatagcctgataaagagctaaatggtaattatcaaaattatatataccatacacccaacgataatgataatttgtttatcgcagtaaagtgagattctctgaattgataaaggttaattgccgtttttcaacaccattgcatgtatcgataaaactaataggaattacaaataaattaaaaatctgaattttcttttttgctctgggtaacaatggctgccatttctgaatgtttctgttattctctctgattttaaaagtgcaacgatacttaacacgaactttgagttgctagtcgccataagcatatgaatgcatcaatcggtagctaggggctgtcaacaactacaatatgtatgataagcagccacctttagatactttccttactaacacctagaaggtagagatagaggtattcaaatatttgcattcagatataaaataatgttctcttgttcaagctgtgaaatctttatctgtagagataaagtgagcatttcaattgaagaaccaatttgtatatttttttagatttcaccgaacgcatgaatagaatttgtctgcta

SEQ ID NO: 179 - DNA, 1938 bp, Drosophila
atgctgctgtttctctggtggattgctggctatataatactcgtatctggaggtacaaatccccccctgtacgccctggatcagccgaatgtggcccggtgtctggactactgccacctgaagaacttgcgcttcctcctctgcgtggatgcagatggtcagctgtcgcacaatccctacaaggactgcaaccgaggattctgcaaggccgaggactttgaactggaatacgaaacggatgaaggcaaggaaaagcgaatcaatcgcgtggagaaaacgagagttgggcaaaaggcgaatctaagggatctatgcctgaacgaacggggaattcccatccgacggaggtgccaaattcgcaatgggaatagagtttggcagagcttggatcacgtgacctgtaggtcggcaccggaactcagctcgagtataaaccttctcgctgtgaagagccctccggacatgattagccaactgagtaacctcctgactcaaactcaggagaaactggccgccgccgatgtcttcagtatttcggagatattcgattcgctggtcaaaaaaccggaaagaaatgctgcagttgtaggggacttgatgaagatatgccaaaaagttatgtctacagataatgaaacccttcgtgtttcagcagacgctaatgcaaccaatgcactccttagcaacttcgaggattatttggatgagcttagtccaacaattttaaagttaaacaccactatttttgcaaacagcactgagttcacattccatcccttgtttgatatgggtgtcattgttctaaagacgagcgaactcagagtattctttgtagatccagaagtgagaaatgtgagtgggatagtgaacttctctggtggcaatatgtcgcatttcgaaatgcttcacctatcggataatgaggaagatataagggccatgaagaatctagaaagtgcggtctttattcccgaaaaactatggacccaactgaagagaaagggagcctcttacttagtttttaaggtctatactcgagattcactctttgtggagacggaagaggaaatcaaacgacggccaactagtaatgttatatccataacaataccaggattgaatgataccaagctacctggaaagttgccatttttcttgcgtaatgcaaaagcgaatgaaactcaatttgagggaggatgtggttactggaactatgagacctggcttagcgatggaatatccaccagcggtggtggcagcttggaagcctcatcgcacccagtgatcctctgccatgcggatcatctgacccagtttacatttctactgggagtgagcaaaatgcaggcaggtctggacaccaatgaagatgatcactccttagatgtaatcaccaatgtcggcttgaccctttctctgttgggcctcctaatgatttttataactgcagccgtgtttaagagcttccggacattagcctccacgaagatattgctgaatctgtgtgctgccctgggtcttcagttgctcttcttcctgatcctgagtcaaagccatttgctggagcagctggaacaatctgagtcggaacgatgtactctggttggagccgtgatgcaatatctactcttggttgtcttcagctggatgtttatcattggatttctgcagtatcaaagatatgtgagagtcattggagttaatcacccacgacattatatactaatgtcggctgtggcggcctggacattgccacttatacccaccttgttggtggtttttctggagcccggttcctacagacccaataattcctcaatggactatcccatcctctgctatccttctggatatggtttaagtctgggcgtcatactccctattggccttatcacggtggccaatgcaatattgcaatacaaaaacttagatgtgtga

SEQ ID NO: 180 - protein, 645 aa, Drosophila
MLLFLWWIAGYIILVSGGTNPPLYALDQPNVARCLDYCHLKNLRFLLCVDADGQLSHNPYKDCNRGFCKAEDFELEYETDEGKEKRINRVEKTRVGQKANLRDLCLNERGIPIRRRCQIRNGNRVWQSLDHVTCRSAPELSSSINLLAVKSPPDMISQLSNLLTQTQEKLAAADVFSISEIFDSLVKKPERNAAVVGDLMKICQKVMSTDNETLRVSADANATNALLSNFEDYLDELSPTILKLNTTIFANSTEFTFHPLFDMGVIVLKTSELRVFFVDPEVRNVSGIVNFSGGNMSHFEMLHLSDNEEDIRAMKNLESAVFIPEKLWTQLKRKGASYLVFKVYTRDSLFVETEEEIKRRPTSNVISITIPGLNDTKLPGKLPFFLRNAKANETQFEGGCGYWNYETWLSDGISTSGGGSLEASSHPVILCHADHLTQFTFLLGVSKMQAGLDTNEDDHSLDVITNVGLTLSLLGLLMIFITAAVFKSFRTLASTKILLNLCAALGLQLLFFLILSQSHLLEQLEQSESERCTLVGAVMQYLLLVVFSWMFIIGFLQYQRYVRVIGVNHPRHYILMSAVAAWTLPLIPTLLVVFLEPGSYRPNNSSMDYPILCYPSGYGLSLGVILPIGLITVANAILQYKNLDV

SEQ ID NO: 181 - DNA, 6938 bp, Drosophila
cagctagtagtgaataatacttgagtttttgagtttgttgggctgggttgaaaaaaaaaaatatgcactttagcctctattaagcattttcctatggttttcactctcgttcgggaactgtgtgttttgaaaatgtaacaatttgcgctttcgtcctcgtacattgtgtgtatttacagaaagtctagcccatttttagattttgtatgggaatgagtggaaattacaagtgtataatatataatacaaatacactttagttggtaagattagcaagacgtaagacgtacgatagttaatgaggggggaattgctagttttatgttaatgcctataagctcaaatttacaactgattattcgctgatcgaaaatgatctcaagatctctatcatttgtttagctttagtgtggatagtgttgaaaggttgacttgaaagcaaatggttagtaactaactgtcgaggaacttagaggtaaacgaaaacgcgtgttttaggaatgggtttgtttttcttagtgtatgtggccttgtttttacagttatatcgttacctacacaggtgggctctgttttaccgatctaaacgtttgaacaactttgatctatcagtgatcctaatcaatcgaaatcaatcgaactcaagactgacagaaatcaacgtaaactaaagtaaaatcgtctaaaaatttatcaaaactttataaaacttcttggctgctttcaaggttcctcactttacgtttcattgaaaaataaagtaatatttgttattgtttgtgtttggtgagtgtttgttgcatctccatttgcatcaatcattttcctgctggttttttttttctttctttgcgaaattaaagtaattcttttattgtttgtgttgttgcgctatataataactatttctcacatattatctacacataccaacgtgtatcgtaccgtttaatacctatatacaattctcaaatatccgccatgaaccagcaaggactccctacttcgaatgcgagaccacggagtgggagaccatcgagtgagagagcattgagtgggacacgccggagatttccgcataggtatccgtgggtccttcggcactgcacaccgaatcctcgggcgtcctggaaggttccgcctcggtgatctcgatgtcctgatgatgcttgttgctgcggtgtttggcacttagagcctgcgaatttgagatattttagtgggtcacatggacaactggtggatatgtgttttctcgttgtagtttcgtgtgcaatctgttttcgataagacttatgtggtgctatctatgggacggacacatgcacacacacacacacacacgcacaagctggtggtttcgggttcattggggaactttgggtctaagtttatagacaaacgtgcgagaaattcttttgatttagtcgttttgttttggattttagtttacattcacaacacagatattttagcaggttaggtttagaggtttatgctaaaagcaaccgaaaattcttaccttatccttgctgccctttttctacattgaacattggtggttattgttttgtttggtttggttgtggtgggtttcgaatatattgtacatagtcatgacaagaacaatgatatttatagatgtattaatataagtggcaaacagtactgcgagttcacattggaggatcaagagaagtacagattcatagacggttagagagacgggggagagagaaagatctagggagcgtggggatgggcagcaaaaggtttggtttcggattgaagaataacagcaatatcgatctgaggcctacagcccggttccccattctggccacgtcaatgtcatgtacagtgagcactatggctggtggtggactacgctgccgttgtggtgaccccgactcacctgcagggagaagcgacggtgacccgccttgcgtccgccacgtcgcttactgatgtgcggattgtcctgccgcagagtcttgttcttcattatctccaattgggtatacagtctggaatcgaaaatgtatagaaaatagagataatagaacatatagatatgcttcgtaccttttgagttcggcgcgtatgtcctcgggactcatttcggatatggtcagctcaccaatgtccggatcgcccagacagagcccggcatatcctccgcccagccgctggccggcgtcgtgtgacgtacccttgaaagcatccacaggtaaacgtattgatagatcatacgctagcgaacgaacctgcaagctatgaagatgcaacaaacaccgcaaaccacactcaggaagtcaaacggaaaatggagaacggaacggaaacggaaatggaaacggaactcaaaggtaagagagagcaaaatcgcatggtatagatctgtgctgaagagttatgtatagttatatgtatatagtatgtgtatgggtggtctgtgcttattggtcgtgattgtatctttgggggtgctggaaatgaacgaaaagaaacaaatcaaattaaaaaagtaactcaaaaggtaaacaagatggacgatagctataagaagactacttagacagagaacttcagtttaagattattcagttgaggcacagaaagacagagaaagttacagtgaggcagagtcttggatacactagtttggaatttttttttctggtatgcatattggaaattttgaaaggaaaccgatttttgtcatttgtttgttagtagttagatgttgtgttttcttgttaaattcatgcaaaaatcaacactaaacatgcaaattaaatggcgtgcttattgagttcaagttaaagtgcaatacattcaggcataaataataagagctaaaaacagtcgaacattctctgtttaaacgagacacacttgcagcaacttcatagcttgactaaagtttcaattcaatgttagcttattactaaaattatgttaattttctcggtgaaaaccagaacaagaactcaaaatataaccataaacaaatgaaatattcaaattgtattttaattagcaaaagcaaccaagcttttgagtggatgtccacattttaatacttcttgtgttttggctagttatttaacaaaaatcgtttcctcaaccaatgtcaataccaagtacgcatttcgatgactataatgacgaccacgcccacgacagacgaaaggcacaaaatgaacgggtgtgaatactctaagcatatgaattatattcgtttggtgcccgactaggacaaaacacttcctaattacatcatatatctcaatgtgtagaacacaaaagcgtactcaaaccaaaaaaaaaaaaaaaaaaaccaaagcaaagtaagtaaatcatatcgtttcgaactcaaatcggttacctgcttgtgctggtaccacaactttggcacaaatatcagacccaaggcgaaactattcgtcagctgggagcggatgaacagggccagcaagatggcgctgggactcatttccggcaggtagacaaagcgcagaaagtagaagctggacgagaccaggaactccagcgtcagtgcggtgaccagaaattgtcgttccttcaatgggacaaaaggaaattaccgattaattcatttgacttgacttaaattccccttctacttagttaatcatctaagccaatctcttgcgcttaattgataaagaaagatctgcaatcgatttgactgtacatcttacccggaactgggtgttggcattccgactggcgatggacaggtgcagtccaaagcacaggatgagcatctcgctggtctgcgtgaccagttcccacttgagcggatggcaggtgttcgtgtccgcctccctgaggctctccagctgcgcactttcgagaagatccaacgacgaggccgtaaaggcggccatgtagcagatgacggcaaagaccatggtgcccagatacttgagcaggtccacgtcgcgcagcacccagcgatgcgctttccgggtgcgaaagtccaccaggtggcggtacaacttcagtatgatggcgccgtagcaggtgatgaagcccagctcccgaagccagggctccagaaggcagcgctcggtggatgcgggaaagaaatggacggcaacctaaagatgaatatgtaaatacacacagaagttgaaggtgaccatcgccaggagcactcacagatgcataaagtaaaacaatgcccagcagtatcgtctccagcacagtccacataccagacgcaatggcctgaaaatgatgaaaggattactcaaagtttcccaactttaggatatgtaaactaaataccttgcactttcgctgccggaagacaatcaccccgaggacaatgcagcacaggatgcaggcgcccagtacgatggccaccaggaggcgcagacaggcgtccacattgagcacctcctcctcctgaaaggtcagacagacgccgttgctatcgcagttagtgcatccgccgggacacggaatgcacgagtagttgtcgtagccctcggacagttccactcgatcgccacggaatccctggagcgtggaattgggcaggtagtaggattcccggcacagacaggtgtacacatcccgggtggcggcgggtttgttctcggtgagcaggcagaaggtcgtattccgatcgcaactacagagatatggtattatatatattatccagaactaatgtcacgaattatcgtataaagtttggccacaactcacccatgacggcgaccgaaaacttcctccaggccatcgttgcacacatcctcgtcggcggcaatgaaggcagccgccacaactctgaaagcatttagcataaattacaaagttgtgccaaccagctgcacatcgatgcgactcacttgatcctgtgctcgctgaaggatatgcgaaatggccagagccagcgacgcgtcaacaggttgcagtcgcgaaatggagcgccccactcctgggtgccgtccgtgctgttccaggccgcactgtagtcgggtaaaataatacatttatgggcaactttccaagattatacggcttatggtctattcaaattaagcgatgcacattatttcggcaagctacggtgcatattgaatttaattgtatttatcttttagagtaattagtatttgcatttcaaagccataagataattgattttaatttgttgctaattaatgtcgcacacttttttgggacacaaccagtcttcgaaacttaccccaactcccgccaataggaacccaaatatgccttattgtgcacctgatccggtggtatctgcaataagttaaatcgattagcccatggccccattatcgctgattagcgagtgcataccgtaacgttatccctgaatttaacgaccaccgtgtgaatgctgggcgcggcaatggcgaatgccagcagattgtcgtcctcgttgagggcgtagctggcgattccattggcccggcgactcacctccgcacgtgtcggctcatcgatggcaatcggtgtgttggcatttgggaatttgcccgataaaaattcaataaactggcgtgcggcatcctcggcgatgtcggtgtagtcgtaaaactgttgaattcataaaaccagatcacaattaattgcgttgtgtcataaataatcatttcaatgtatatgaaatgggcatataaatatcatttaaatcgaattcgatttaaatacacaaagaaaaagttcaataaaattaacacagcataaatttacgctttgctaaactcaatttatttataccacactatataggaaacggaaaacgtgtgctttctaattgaagatattttcggaaattgcgaaaaaattacgtatatgccacgtatattggtcgccacgtgatttaagtgaccatgcggcacggccacttcccccgacttgggaccattaattattcacctggcgcacaggacacgtttcacagcaacaccttgcggcaagagtgcgaaaagttttgcttcgtttcgactgtgaaataataggatttaataccctcgccgtgctgtgggactgcgggaagggtttttaatccaagttcgttcagctcctaaccgaccaaatgtttatacataatttacacgttacaagaaactctcgagatctacgcaccaaagtgtaggaaatggtagggccactttgatgacatcattatggctttgggaaacaaaagtaaccacagaagggagcagggagggggttgctggtagcggggaaaaaggacacgttgtttgggcgtgagtcatgtagttgggctggcggcaccttttggcttttaaaacaaatatttcccattagctgggctttcggtgatgagcgaccacattgcgtatacgccaccgaagccaccaaataaattgccaacaagtaacatcgatatacaaacgtttgctggatgctcctctaccatgtgtgtgtgagtgtgtttcttcattttttttcctgccaaacgtgagccaaaatttacacatcgaggcaaaagcaatcagtataaggcagctggagaaatggcacgagacctgctcccagataaagtcattatgtagtgctcctagcactcgcgcgcagccataatcataaacatttggtatactcttgcatgctagagaaatattgtagttgggtaagtgttttcagatattaaactaagtaaggaaatatttctatttttacaccattattcattgttttttcttcaggagttatctgaactttaagtaatcccaccacagttcttggaagcagtagaatgtcttcattaccgccaaatccttttgatatcctttttcccaaatgtccgcaattacacacataccctcgcactagcgcccctcgttttttcagggtataaatgtatggggaaaacacttgtaaatagcggcagcagccac

SEQ ID NO: 182 - DNA, 2010 bp, Drosophila
atggtcccaagtcgggggaagtggccgtgccgcatgttttacgactacaccgacatcgccgaggatgccgcacgccagtttattgaatttttatcgggcaaattcccaaatgccaacacaccgattgccatcgatgagccgacacgtgcggaggtgagtcgccgggccaatggaatcgccagctacgccctcaacgaggacgacaatctgctggcattcgccattgccgcgcccagcattcacacggtggtcgttaaattcagggataacgttacgataccaccggatcaggtgcacaataaggcatatttgggttcctattggcgggagttgggtgcggcctggaacagcacggacggcacccaggagtggggcgctccatttcgcgactgcaacctgttgacgcgtcgctggctctggccatttcgcatatccttcagcgagcacaggatcaaagttgtggcggctgccttcattgccgccgacgaggatgtgtgcaacgatggcctggaggaagttttcggtcgccgtcatggttgcgatcggaatacgaccttctgcctgctcaccgagaacaaacccgccgccacccgggatgtgtacacctgtctgtgccgggaatcctactacctgcccaattccacgctccagggattccgtggcgatcgagtggaactgtccgagggctacgacaactactcgtgcattccgtgtcccggcggatgcactaactgcgatagcaacggcgtctgtctgacctttcaggaggaggaggtgctcaatgtggacgcctgtctgcgcctcctggtggccatcgtactgggcgcctgcatcctgtgctgcattgtcctcggggtgattgtcttccggcagcgaaagtgcaaggccattgcgtctggtatgtggactgtgctggagacgatactgctgggcattgttttactttatgcatctgttgccgtccatttctttcccgcatccaccgagcgctgccttctggagccctggcttcgggagctgggcttcatcacctgctacggcgccatcatactgaagttgtaccgccacctggtggactttcgcacccggaaagcgcatcgctgggtgctgcgcgacgtggacctgctcaagtatctgggcaccatggtctttgccgtcatctgctacatggccgcctttacggcctcgtcgttggatcttctcgaaagtgcgcagctggagagcctcagggaggcggacacgaacacctgccatccgctcaagtgggaactggtcacgcagaccagcgagatgctcatcctgtgctttggactgcacctgtccatcgccagtcggaatgccaacacccagttccgggaacgacaatttctggtcaccgcactgacgctggagttcctggtctcgtccagcttctactttctgcgctttgtctacctgccggaaatgagtcccagcgccatcttgctggccctgttcatccgctcccagctgacgaatagtttcgccttgggtctgatatttgtgccaaagttgtggtaccagcacaagcagggtacgtcacacgacgccggccagcggctgggcggaggatatgccgggctctgtctgggcgatccggacattggtgagctgaccatatccgaaatgagtcccgaggacatacgcgccgaactcaaaagactgtatacccaattggagataatgaagaacaagactctgcggcaggacaatccgcacatcagtaagcgacgtggcggacgcaaggcgggtcaccgtcgcttctccctgcagaaaaagggcagcaaggataaggctctaagtgccaaacaccgcagcaacaagcatcatcaggacatcgagatcaccgaggcggaaccttccaggacgcccgaggattcggtgtgcagtgccgaaggacccacggatacctatgcggaaatctccggcgtgtcccactcaatgctctctcactcgatggtctcccactccgtggtctcgcattcgaagtag

SEQ ID NO: 183 - protein, 669 aa, Drosophila
MVPSRGKWPCRMFYDYTDIAEDAARQFIEFLSGKFPNANTPIAIDEPTRAEVSRRANGIASYALNEDDNLLAFAIAAPSIHTVVVKFRDNVTIPPDQVHNKAYLGSYWRELGAAWNSTDGTQEWGAPFRDCNLLTRRWLWPFRISFSEHRIKVVAAAFIAADEDVCNDGLEEVFGRRHGCDRNTTFCLLTENKPAATRDVYTCLCRESYYLPNSTLQGFRGDRVELSEGYDNYSCIPCPGGCTNCDSNGVCLTFQEEEVLNVDACLRLLVAIVLGACILCCIVLGVIVFRQRKCKAIASGMWTVLETILLGIVLLYASVAVHFFPASTERCLLEPWLRELGFITCYGAIILKLYRHLVDFRTRKAHRWVLRDVDLLKYLGTMVFAVICYMAAFTASSLDLLESAQLESLREADTNTCHPLKWELVTQTSEMLILCFGLHLSIASRNANTQFRERQFLVTALTLEFLVSSSFYFLRFVYLPEMSPSAILLALFIRSQLTNSFALGLIFVPKLWYQHKQGTSHDAGQRLGGGYAGLCLGDPDIGELTISEMSPEDIRAELKRLYTQLEIMKNKTLRQDNPHISKRRGGRKAGHRRFSLQKKGSKDKALSAKHRSNKHHQDIEITEAEPSRTPEDSVCSAEGPTDTYAEISGVSHSMLSHSMVSHSVVSHSK

SEQ ID NO: 184 - DNA, 4243 bp, Drosophila
ctcgtgacctttgaacccgacgctggcactttgaaacggaaacggaaacacacactcacacacacgtaatttggttagtctgatatcgatgcactatatgttggctaatttagacggactttggttttgaccaatcgccagggtcctacatatatggttttgactatatattctcgctatgtttagttgattatacgatttaggggtttactttaggtattttgagcattttcaattcatgcgattgtcgttgaaataacaattgggttttagctttgctttagctgccgtgacttttgtttgtatctctataaatttatcaatattctccgattctaattgcgttgggggtgtggttgtttattcgcaggacttctcacgtagttgtctataatttgcggtctcttaattggcacagttttagttttagctttagctcgtcgattttgcgaatccctatgtacacgcatagctcagtgagttgcagtgattgccattttgaataatttatttgtggttatttcttttcgtgagcaaaatgctttacggcttacagattttcgattggcgtacgtacatacatattacatattcatatacatttatcgaaatgagtttacaacctgtgcttaatttagtcgtacaaaaatactcagtatttacaacaagatataaacgacataaaatcataaataaataagttatcctatacaaagtcccgatctgtgctccaaggaacccggcaaactcgaattgagattaaatgttttaaaaacgaaaacaaaaatgaaaaaatgtgaagaaaatgaaatggcacgctccacagattgaataatgtcaacattacgagtaaatcagccgacgcatttgccggcatattaattttacaaattaatggaacactttaattgcattaaattgattccacccatccggctggcatcgattgattcgattcgcatccttacaccagtcgcaccatttgcaccatttgcaccatttacacatgactcgaggccgtcgaggcggcggcattgttgttcttgttccatttgttgatgtactccatgggtatttcaatctggatctcctgcacatcgtcgcccgccaagcaatcgacattggatttgcccttgcccgcatccttgcccgtatcctttgcatccttcgactccctgccatccttggcggcagctgccaattgtccgcccaggcgggatccgcccgccgccagccgctgctgctgctgggcgatgggggtcagcagcgcctcatccctgtattataagttgtccaccatctgagactggcggcgatgcgagggcgttgtcgagttaaggtagctctccgagtagacgctcttcgcccgctggtcgtagcgcaggctggagcgccggatgtcgatgtccagaggcaggtggcgatccttccaccaattgcagaacaggcagagcagcgtgttgcggaacgcctcccggaagtcgcggttgaagtacgcgtagatcagcgggtttagcgttgagttgaagtacccgatccagaagaggattgagacgactatgtccggcacttggcactcctcgcaggtcatggagagtgtgtacctaaaattaaaacaatataattattagcttacactcattatctttaacttaatttaagtcaattttaaattagttgcacaggtaatgcaattttatgtactttttttttcccggcattgcataatatctattttttaataatacaaaagcaaatataaaagatcaaatgaatatttttgtttcataaaagttaaacctcataaacgatctatatttgaatactttgatcaccatttgaaatctttctgcatcactttttgtctgtgtagcacataaagatgagatatatatacccataaattccagatgcatgagtgggccagggctttgcataaatgagattatactctgggtggtgtgaaaaacaacaaccgccgaaacaatggcgcacgggccgtatgagtaatatttaattatgcatgcttgacattagataaattatgcctggaatcccatgtcagcgggattggcctccaactctcaaccaaacgttcaaccttcgacggctggttggtactcaccacaggaagaaaggcagccagcagaggatgaaggtgcccatgatgatgcccagcgtgcgtgcggccttgtgctcccgcttcattttgattaagtgcttgtccttagtgggggtgtgctcctgctcgacctcgtgcagcgtcaatgttttcgacgacccggatccgctcagcgcctcgcctgccgtaggagataagatggagatttgataaaagtccaggctggagatgggccactgaactcaatgcactcgcactgcatcactgtccaggatgcttgtagaacaaactagtgatctttcacgctcactacctgtttgctattcagaaagtaataagactttctgtcctggtaaatttatatttttgaagtattatttccacttaaaacccattatatatattcaaacaaacatttctttacagccaaactaggtaagccttgttgtttacaacccaactttgactccaaactcacctgatggctgcatggatggtcggtgcatcagcatggcattgccgtgccgcatcatcagctgcttctcctgccgattggcttcccggaagatggccaggtaggtgaatatcataatggtgcagggtatccagaacgatatggagctcgagatgacggcgtagtacttgttcaccacgaacgagcactgcgtcggattctggatgacgaactgctggtgctgcggcgtggtgtaccagccgatgaagatgggcaagaaggagagcagtgccggcgatatccatgtgtttagcagcataatgccgaccacgcgtttcgtcatgctaatcggatacttgaggggcttaacaatagcatagtatctgtgaagtgggcaaaacgccaggttattgggccctcatatagctatagttctggctgtggcatgcaacttacctatccacagatatgcagcataaatgcaaaatactcgctgttgagaagtagacatcgaggctgttccacaaatcgcacaggaaggggctgaagttccacctgaaagggtccaatgaatggaggcattagtatcgcgatgcttacccaataacgaggcaataaactttggcctttactttctaacgtcattgtatctgattatcgagtccatgaatttgcagtatatatttttgttgactcatttctggttttttgcctcacctaaaatgccacgcgaaatacttttatgaagtcatcgctttaaaactgatttcctggtttttagctgtgcaaaaaatttagtttttcacgattaattccctttgtgacaacacagttatttacgtactctgattaaaatcatttgattgtgggtaaaattgcgctagttctaatatttactaccatttaaaatacagatatataggccataaaaactcactagatatgcgcaataaggttgctctaaatttaaacggcattttactgccaattcctgaatgtaggtctataaaaaactcaaactgactagacacactctctttttcgcctattttcgttatcaggccgcctgatttatgtgtttatcgatttcatcttagtttcggttgccaggtgacattgcccctgaactgccattctggagggccaaattaaaagcttagatgcactgtgagaccagaaaataggccataaggcccgaggtgaaaagtggcaaggaaagcggaggcgactctgttcgctgcatgaaaaactcattaaaacttgcgtcgtcgctgttcgcctgtcgcttctgccgtcgcccttggttgccactccgcattttggccatttcggtgaaggcggatacccggcctttttggggccaggagccagtggaatttattatcgggcgccccgtttggcatcagtttcaaaaacttttcgactatccaacgaggctgtttttgctcgctggtttttggtgctttacactacattgccatttggggcgggcgcgccatcggttttgacacttaagccatgaaatggcagttcctcgtgctgcaattatgcaactggcaactgtgaaggtaaaatgtctaatgaatgccaagtggcggcgagttggctgttgccagaaccaaaccgatgccaatttatatgcaactcgcgcttggccaaagtttttc

SEQ ID NO: 185 - DNA, 1224 bp, Drosophila
atggactcgataatcagatacaatgacgttagaaagtggaacttcagccccttcctgtgcgatttgtggaacagcctcgatgtctacttctcaacagcgagtattttgcatttatgctgcatatctgtggatagatactatgctattgttaagcccctcaagtatccgattagcatgacgaaacgcgtggtcggcattatgctgctaaacacatggatatcgccggcactgctctccttcttgcccatcttcatcggctggtacaccacgccgcagcaccagcagttcgtcatccagaatccgacgcagtgctcgttcgtggtgaacaagtactacgccgtcatctcgagctccatatcgttctggataccctgcaccattatgatattcacctacctggccatcttccgggaagccaatcggcaggagaagcagctgatgatgcggcacggcaatgccatgctgatgcaccgaccatccatgcagccatcaggcgaggcgctgagcggatccgggtcgtcgaaaacattgacgctgcacgaggtcgagcaggagcacacccccactaaggacaagcacttaatcaaaatgaagcgggagcacaaggccgcacgcacgctgggcatcatcatgggcaccttcatcctctgctggctgcctttcttcctgtggtacacactctccatgacctgcgaggagtgccaagtgccggacatagtcgtctcaatcctcttctggatcgggtacttcaactcaacgctaaacccgctgatctacgcgtacttcaaccgcgacttccgggaggcgttccgcaacacgctgctctgcctgttctgcaattggtggaaggatcgccacctgcctctggacatcgacatccggcgctccagcctgcgctacgaccagcgggcgaagagcgtctactcggagagctaccttaactcgacaacgccctcgcatcgccgccagtctcagatgcagcagcagcggctggcggcgggcggatcccgcctgggcggacaattggcagctgccgccaaggatggcagggagtcgaaggatgcaaaggatacgggcaaggatgcgggcaagggcaaatccaatgtcgattgcttggcgggcgacgatgtgcaggagatccagattgaaatacccatggagtacatcaacaaatggaacaagaacaacaatgccgccgcctcgacggcctcgagtcatgtgtaa

SEQ ID NO: 186 - protein, 407 aa, Drosophila
MDSIIRYNDVRKWNFSPFLCDLWNSLDVYFSTASILHLCCISVDRYYAIVKPLKYPISMTKRVVGIMLLNTWISPALLSFLPIFIGWYTTPQHQQFVIQNPTQCSFVVNKYYAVISSSISFWIPCTIMIFTYLAIFREANRQEKQLMMRHGNAMLMHRPSMQPSGEALSGSGSSKTLTLHEVEQEHTPTKDKHLIKMKREHKAARTLGIIMGTFILCWLPFFLWYTLSMTCEECQVPDIVVSILFWIGYFNSTLNPLIYAYFNRDFREAFRNTLLCLFCNWWKDRHLPLDIDIRRSSLRYDQRAKSVYSESYLNSTTPSHRRQSQMQQQRLAAGGSRLGGQLAAAAKDGRESKDAKDTGKDAGKGKSNVDCLAGDDVQEIQIEIPMEYINKWNKNNNAAASTASSHV

SEQ ID NO: 187 - DNA, 11847 bp, Drosophila
gtgaatcgtttttgcagcgaatggcgaaatttcctacagcttgccaattgttttggttgttcgcagttcattctttttactcattggtaagattgtctttctgcatgaaaattcataacgtcagctacacaattctcttccattcaatattttgtccatacataatttcgattgcgtaatttgtaattttcaataactctgttatgtagatttggtttgctagttttctaggttacatatgtatgatacttagagctagaggtaacattatgggattgcactttttccatgatttaggctagttctatctgtaacaacattaaaaagtgtgtttaatatgaaataaaagcagggagttcattccgctcaggatttgcaatcctaatatacgatgatgacacatgtgaataatccaattttggatcgtattaatactccaaaaatcgatggaaaaagtgtttcgccttcgacaagccgaagtggtgtacataattcttagatgattcatttgacaacatttcacttgaagttggaacttttctacgcaaagagtcgctcgatttctaattggctttcgctctgccatatatgtatagttattacgtatatcttctgtttagttggacaaacaacacttatatatggatagtatagttccggggcagcattgtccctgcagccgcggcttggcgggcttagaacacaactttaatttaaattccctatcgttgcttaaacgaaattgtacacgtatacataaacacacatcgagtattgcttagcttcaaggattatgctagctatatcctggcacaaatgccactggtatggccgttgctcttgttacttctcttcacttcagctggtgttttccctccttgggcacatatacatgtgcgacgattcactcaagtattaaatatcacttataggggcattgttccgcatccacgagggtggacgaagcaggaatgtggccgggatgcagacgctatccggtctagacgtagtaggcgttgtacggatttcgtttctccagacagggcagcacacactccagcgtattgcggaatgcctcgcgaaaatcgcgattaaagtaggcgtatataagcggatttagcgtggagttgaagtaaccgatccagaataacaccaccacgagcacatcgggacatgggcaggccggaccgcagagcgatgtgatgacatacctggaaggaggagtgagaatcacatgaatatgagtcaccagaaaaagaagaataagaaggccaacaatggattacggatggcggtaccacatccgtacggcctatctaccgtcactcaccacagaaagaagggcagccagcagagcagaaagacgcccatgatgatgcccagggtgcgggcggccttgtgttcggccttccatcctttggccggtcgcacggaaccgcctgtggggcagatagagagtttagaagggatatgaaagctggcaattggctgattaagttcaattcgaatcgattcgtttcgatccgccagtctgttttttttcttttgttgggtcatagcaatcgacagttttctggttcatttctgtctgtctgcgaaagcactcgaaaaatgggtttctttttaagtagtctataatatgcttaatgtggtatttgttgtctacctgttggatgtgtttgttttatggtttattgcttctaggatgaaattgtttatacagctaatactggaaagtataggtgtttgcttaagctttaatcggcgatacccttttatgttaactatgtatgtaaattaattgaacttcaatcaattaaaatacagaaaatttcaaacaaacaaattttaaagaggtaactaaactaatcttaaaaattattaaatattttctctgtgtgtaaattgccaagaaatgcggtttatgttcgttttattgtgagagaaagattatgccggcatgttgcgtatacgccatgtgtgtggtatccttgtttaactttgacattagtaatacttttgctgttatatgttgttggctatcgatggcatttcaaaccccacaccgccccgctccctgcgtccaccttgcaagtgactgtcattaaagtgctggaaaggccaacatgtgtgcagtatcttggtgctcgggcgtgtgggtgtgcgggaaaagcaataaaaacgaggcaaacaattgaaaatatttacacaggacacttgttatcacaaagacatacaatcccccgcatccatccagtccagtgcgcccgccccaaacataaacataaacatcactggcggccaggaggaaaaacaaatcagacagacaacagtgagcaacaggaagcaacggaccatcgcccttgttcacccattgcccatcgcccattgcccatgttcccccatccagtttgccacctggatcccttgatggacgccactcggtgatggccacagccaggtgaaatcataatgcaaaggctgtgtggagggaggcgtaataaagcaaagcaaacgcacgtgcaaacggaagcaattatgtacagcatgagagcagcgaaaggtgaaggattcggatacggattcggaggcagattaggtggaggtggagacagcatgaggtttcgatggtgtaacactccggattcagttgcctaagctggttagcttggcatccggataaggaggtgccaaaaaactggcacttctgtgggtatttgccactaaagctgggggctacaaaaatttgaggtagttcttttcggtttcatttcacggttgatttaatgatacttaggttaaccaccgttgaaatgattgggattgcagaaattcagggatatctattctagtatgatttttggtaagaacgttaactagtttcaggtgtattcaaaagctttcaattttaaacataataggtttaaacatatacggaacagtaatattgattgttttttgactgacaggatatttcatatgaaataaatagatttttgatatgtttggtctaatgcagtggcataaaatacgaagtgaatgggacttgatttgattaagattttctgatgattatatatgtattgatatagagaaactataactattggtgttgtgaaattagtgaattctgagtgtgaaatgtattataatataatgcacaagttctggactgtgggaaatcgaatgattcagatggataatgggtagcaatgagataggtgctgaagctgagacaagcagaaagacagagatagagagagaagcgggagagaaagagcgaaacgtagagactgggggaggagaggaggggagatacgacaagactcaccggttgcaccacagtgactgcatccggttttgaagcggcgcttccggttcttgctctgctgccaacatgctgtgaccgccgccgttcgcttgtgccagaatcgagtggaactggacgaggaggcgggcctctggccaagatctggagtttgctcgtgaatactacgtttactactagtggttactgtggtgtcgattgtgctgtcggcgttggcggttgcggttgcgtttgcggtggtgccggtggtgctgctgatgtcggcgccgcagagcggacacttgggcagcggactgggcaccgcggcgaaggtgatgccgcggggccgctgctcaatgatctccgcctcctcctcatccacaaagatgcagatgccgccgcgtcggatcagcgaggatttattggaaaattcgtgctctgcttgcagttgattgttgcattttcgtacgatttcgattgtcaatttggccatggcatttttggggttttattggttggatttggttttggagtagaagtagtttgtttgtttggttggacataatttggtgatttcgatttacatatatacacatacaacacacaacgaaatggcgtggaagagagatagatataaagagatagagacaagtagtaaacaatgtacacagggtatttcacaggatacgaaaggacttcaacttctgagatcacatgcagccatgcaccggcaaacgcaaaggatcgggatcgaaaagggaatggattcagattcattatcgttggctccctgtctctggaagtaggtcgtccctttctgtcttcgtttgcaggtgcaactaactaaatgctatacattatattatatatatatagtaagctagttaactaaagtttcattcgaagcatttgagtattacttttccaatgagggtttataggttctatacattttaaaacactgtatgatttttcagaaattcgcaccgcttttgaaaggaacttaaatacacaattcacagttttcttcaaggtaagaactatatttaaatatggtaaaagttcgtatctttattttaagatcaaaattctagtaagaccagattccttatgttaaacccgaattcaggccaattactcctcaaaaaaacaaggacaaaagaatgtgcgaaaaagttaagtcaaacattgaaacacttgaacttttcgtggaaaactgacaaaaacagaacgaatttctctggggcagatataaattgtcttaaaagagctacttaaatcaagcacgagctatacagtctacacaatgaccaaatggatgactactcacttgcggaactggtggaaacgcggcccatcgggatgtagctgcgactgtcgctgttctcctgcgagaagttgatgacattcacgtcgtaggtcaccacggacgcctgtctcttccgcacagtttggatgccatcgtagcctgccaggatgctgcagcggccttggcggccacccactcctccaacgccaccagcccctccattgccggaaacgctcacgtccgcatcgccggcgctatctttgcgcttgaacagtggcgacgtgacatcccggtgctcatcgccgcatccctcaaccggcgacagcgtggaatcgagtatgatctccggcttgggcgatatgttggactgtgaggccatttggggatttggctgcggcactggaacgggcataggcaggctggtcaccacatccaaggacacagtggatgtgtcactgggcgtataaccaggtgcggcggcatgcggcggcggcgataggaagtacacattgatggacgccgactgcgcgttggaagaggcggaagagtccatggcacctccgttcggcacggaaatggccggcggagccggtgtgttcggtggggacatcagatagttggcgcacacctggtcactgagcgtgctcaggcgctgtggagcaccagccggtcggcccagcggaaagctcagcgagcgaaagatctcggccagttccgagctgctggcaatgagcaggccactcggttctggcaattctggcggcgataacgatggtggcggcgtggccggctgctggggcgactccccaaagcaatcggccagctgcgccaactcgtcgtcgctccgaatcctctcgggcggtgttttcagctcactgaagtcaatcagctgtaccccgtcgctgaactgctggatcacactggctccactctgctcgctgagcacattgatgtccagcaggatgtccggcttgttgggcgtggagtccgtatcgctgtgctgccgctggcgtctctcaagtttgcgttccttgccgccaccgcatccgttgtagctgtgcgacaatttccggttccgggagcgccggaagaagctggatccctcggagttggcctgatgtcgcttcttttccagcgtaaagcactcggtgctcgagcgtttcgtcttcgacagcagggacagaatgttgaagcccttctccttcccgggcactggctgctccggcaacgcccgcgattcactaatggtgcgcaggaactccgaatcgctggaggcgaatgccttacgcccacaggccgctgcgcccgccttcagcctgatgaagtccgtttcactgagggcagcgtactttcctccgcctgggccactgataatggtgccgcccgtctggcgcttaaagtacagatagttgtcctctatcaggcgcttcagctccttgttgtcctcggccagcggcaggtgggtgtcgtacaggtcgttgccctcgctctcgtcgctgttgagaccaccaaagacccggtacgcagtggactccggttccggttcgctgttcccactgccgctggtcaggctgagctgctgttgcgggccattgggatgagaatgctccttatcgagctccttcgaagggatcatcttgccctccgtccatatctgcggattgaacactggcgccggtggctgcaactgattgtgggagggctgctgttgctgcagtgccatcatcgagggagcactgtccgtgtgggtgaccttctcgtaccgctcctgctccaagtccctcagatcgatgctgctgcggctgaggcggcgtggcggcggcgatggcactctcagttcatcgcactcgtccctatcgtcgtcctcgtcggtggccggctgcagcatgtcctgtgggcaaaggacaatcactcaaagggaagtcatggtggcgcatcaattacgcacagccacaagggaaaaggaaaaactctcaagcggagtgcttccctctagcacctaatctaatcgctccacatccgttcattgaggatgggcaaaaagctttagagcaggatgtcaatgttgcccgtttgtatacatgaactgcattgctttaaagtctttgtatatttatttaggatactatctggatgtatcagcaactttaccaaattttactcaataaaaaataaataatgttttattcaactactaagagatcttcagaatggcaagcaaatgcgagtactaaagcatttatcggtttaataaaaataaaacatttttaagtatctctaggtattttaggcatctttggattaatgtgtattttttcattttgaacatctttgaaatgtttattgtttattgaatgatttattgaatttatatcaataaaatgcagcaaaatactcttttggctttcaataaatgacatctgtatcttttcggttcagtaacatttagtaaccttccaaactcacctccaagttactaagcgcactgtgcgtctcctcccgggcggatgtggcattcagatcacagtcactgggatgcagatagctcaggctggtgggctgctgggtgtggcccatgtggacgctgttaaggaggatgttggagctggtgcggctgagggccttgcgttgacgaatcgcctccctggaaaaccacagagcacagatcagcaattaagcaaactcatccactacgaccagcgaccatcgaccatcgaccatccgggtaagaactcacttaaagatgcgccagtacatcaccagcatcacaatgccgggtatccagaagctcaccgaactggagatgagggcgtaggccttgttgaccacaaacgagcactggtccggatgcagggaaatctcccgcaggtgctcctccgtcgtgtaccagcccagaaagatgggcgtgaaggatatgagggcgggcaggatccacacattggcgagcatgaagcagaccgttttgtgtgtcatattcaatggatactccagtggacgcacaatggcgtagtatctgttaaaaagaagagggggtcatctttattaatggaaatgaattgcggacaggtcctccgcacaaaggtgccaggtggctttcagccatttcctccttctcctcctcctccttttggcttactaattgattatcgctctttggttggctgaataattgtgtttcggtactcaggttgccatgcacagaaatcgatttattaaccttttaaagatcatgttgcatttaaatgaaggataaatgctcttaaccgaattcattatcggaatccgtgaaaataaggtggtgtattctttttaattatcaatatattaataaatgcaattgaaatgaaataattattaatccacgtatattgtacctcattattttatcgaaacttaatgctccttttaaagagtaatgattatgtttggaacattacagatttattagtttagccaaatttccgttagtggccatcattaattctctaattttgataggttctggttgaatttccctttgtttcttggtatgttttgtggcccgtcgaaaggtgagtgaaacacaaattaattaaaacagacaaaaggcccatgactccagtgtccatcgaccatccctccattgttgctggtcagcccgaaaatcgcagctgttggtgccttccaagtggggaatggcgccaattaacggcttgacaggatggagaaggttgtgggagttgggtggaatatgggtggaatatgggcaacgcccacgtttcggccagctgcaaatcatttgggccgcattcatcatacgggcgggcctaatgtttgcttttgatgtgcgcgcctttcatagtaattaattgtttcttcttggcaattcgccgggctttggtattgaaagtgatttggttgccaggcatctgggcaagattaatggtatttggccaaactaaacggctttcttcagtaccatagcccagcacaattgactttaaaccgcttaatatatagatagagagcgacataaatgggcactcacctgtccactgatatgcagcacaggtgcaatatgctggccgtggaaaagtaaacatccaggctgttgtacacgttgcacatgaacggtccgaacatccactttccgccggacagttccacggaggcgttgaatgtcatcgcacagagggccaccagcatgtcggccatcgccagcgacacaacaaagtaattggttatcaccctgcgaacgaaacaaaagcccaggaatttgtgaatatggcgtggttctgggcgggatttgaccagcttctccccacatctaaccacttgtcacagcgcaaaaccacgccaaacgtaatggcatatggcatgcatcatatgtgcacatgccgctgtactaagcgctttggttggctccttccgttggccaagcagtgcaccactgctttccatttcctgttccggtgttcaggagtttggaggcaataggtcaccggtatgcagcaatttccttggctgtcataagtcactcgactcaccaggcagctgccaccttcagctgcaagctactggcttgtgaagttatcatcttgtcttcggggcgtatgtggtttaaggagctgtttatgcgaagatgaaagcacttttgtgcttccaagtcatttattacatattgcgacatctattacgttggaaagtgtagttttacaggggctgacaacattgtctaaaacatgttattaacgtatattgtaatattgtagtaatgaagctcaattaaatcaagattattaatctgtgcatttagaagggctgttaatttcgaaagatccttttatgtcaagccgttttttcttttatgcactgctttattttgtaatatctcaacgcaattctatatggcgaacgttctatcgtaaggtagtaaatgataatctgagcactttaagctcctttagcggtataataaagactttaatcaacatctacccttgctgcagaaggcataaacgttgcgcaacattaaacggatgtcgtgggtgtacgtgtgggggcgtggccgggggcgctggcggtggcagagcgctcaatggtatgctacacttatttgcactgcactctggggcgtcctgtcatcgcgacgctgacatggcagcgatgggcttgggatcggcttgtgtgccgcatttaacttcgttttgttctttattattccacttgtcgctcatttaaattacatttatcgcgatggcgaaaaggattcgccctgccgcgtcactgtttgtttgccatttccattgtcctgcgacccttgcggcaatgaccctcaattaaactcagttacaggtggtgaaaacaaaagtaattggatatagacttaccgcagctttcgattgcgctgcactgaaatgatgaccaatgcattgccgaggacagcggccaggataattgacgagaagatgaatcctttgagcagcagcagcgatagatccagccagctctcctccagctccgcctggttatccaccgcaatgtcactgccattggccgttatatttgggccgactgtcgagaggagctcaaacgtggaatccgacgacaagtaggatgaaaagggcgaggagtaggaggcatctgacgatgtggctgttaatgatagcgaagtcaacgaggcatccacaaattgcgatgttataggcaaactgctcgtcggcgtcgtcgtagttttggctgctgctgtcgtggaaatgtggcctgttaatgttgcaggttgcaggtggctggcgttggtggctgatgttgctgctgcttgtgatgttgctgctcctgctgcggctgttatgggtaatgtcattgtcgtggccagaaggtcagccacgttaacccctgacatctcgtcgatttcgcagcccaattgagtcgcagctcattcaagttgctccgccaatgctttttcgctgtacttgtcgtttatctttttcccggctgctgtgcgtaatttaaaactcgagtaattgcaatctgcaatgcaaacaaggctgccgaagtttgccgtcatcctggttgccaatgttgctcctctgcgattccagtatttgctcacagctccgactgaaggtctctgctccatttcccaatcctccataggacgcttttcccgtttgagttgctggaaattggcaaaaagtcgagactcgcgcttcgatttggcactcaagcgcgcaacagtcggcgacacgggaactgcaaatgaataaataaataatttatgaaataatcggcgagtgtgaggctgtgaaactgcatggcaaaattggtaaaatgggaattcgaacggttgcgccgcccggggtgtttttatgtacatacgcaatattcaacagggggcataaaccctattgcctatttatgtgccgcagtaacacataaatgggattcttctgtttctccagtgccccgtcaaatgtccgttcgttaaaagtgcgccacttcaactttgctacactagattaaaataacagaaatatattgcgtatacgcagtgtgtgcactcggcatgcatctgcatttctatatccccagcgagacagcggtgctgtcaagtgctgacacttgtgcagagtggaatgtggaatatggacaagttgttgctttaaaagtgagattaaagcaagattatcagtgggaaagttgtttcagtagtgcctcacgcctgggcgcagtgaaaactgcaaatcctttttgtcccggtacttgtaagtaaaacaaaagactcttcataatctgtggtaatctcgaattttttcttttttattattttaaactttttgcgactcaatttggccgtaaaaatgctaacacatcatcagggaaaagctgaaagcgtgcttacactttactttctcccccgcaacattgaattgaagctgaatccgtccttggcactcagacaaatcgctggctacacgttttcattgcacttattctgtgcactctagatgccctgccctcattccaatcttcagagttttgaatctaatatttttaaggatttatgtacttatacagataaccttgccgaattgattgcattgcgttgtccttgagctgtcgattcgacttgtttactcagaccatccggtcacatcctcctgctagattggcaacttaatgttttaatgctcggacttaaaccacatcagtgcgctctatcatccttggcttatacatttcacaagccatt

SEQ ID NO: 188 - DNA, 2092 bp, Drosophila
ttcccgtgtcgccgactgttgcgcgcttgagtgccaaatcgaagcgcgagtctcgactttttgccaatttccagcaactcaaacgggaaaagcgtcctatggaggattgggaaatggagcagagaccttcagtcggagctgtgagcaaatactggaatcgcagaggagcaacattggcaaccaggatgacggcaaacttcggcagccttgtttgcattgcagattgcaattactcgagttttaaattacgcacagcagccgggaaaaagataaacgacaaatgtcaggggttaacgtggctgaccttctggccacgacaatgacattacccataacagccgcagcaggagcagcaacatcacaagcagcagcaacatcagccaccaacgccagccacctgcaacctgcaacattaacaggccacatttccacgacagcagcagccaaaactacgacgacgccgacgagcagtttgcctataacatcgcaatttgtggatgcctcgttgacttcgctatcattaacagccacatcgtcagatgcctcctactcctcgcccttttcatcctacttgtcgtcggattccacgtttgagctcctctcgacagtcggcccaaatataacggccaatggcagtgacattgcggtggataaccaggcggagctggaggagagctggctggatctatcgctgctgctgctcaaaggattcatcttctcgtcaattatcctggccgctgtcctcggcaatgcattggtcatcatttcagtgcagcgcaatcgaaagctgcgggtgataaccaattactttgttgtgtcgctggcgatggccgacatgctggtggccctctgtgcgatgacattcaacgcctccgtggaactgtccggcggaaagtggatgttcggaccgttcatgtgcaacgtgtacaacagcctggatgtttacttttccacggccagcatattgcacctgtgctgcatatcagtggacagatactacgccattgtgcgtccactggagtatccattgaatatgacacacaaaacggtctgcttcatgctcgccaatgtgtggatcctgcccgccctcatatccttcacgcccatctttctgggctggtacacgacggaggagcacctgcgggagatttccctgcatccggaccagtgctcgtttgtggtcaacaaggcctacgccctcatctccagttcggtgagcttctggatacccggcattgtgatgctggtgatgtactggcgcatctttaaggaggcgattcgtcaacgcaaggccctcagccgcaccagctccaacatcctccttaacagcgtccacatgggccacacccagcagcccaccagcctgagctatctgcatcccagtgactgtgatctgaatgccacatccgcccgggaggagacgcacagtgcgcttagtaacttggagcggccccgcggcatcaccttcgccgcggtgcccagtccgctgcccaagtgtccgctctgcggcgccgacatcagcagcaccaccggcaccaccgcaaacgcaaccgcaaccgccaacgccgacagcacaatcgacaccacagtaaccactagtagtaaacgtagtattcacgagcaaactccagatcttggccagaggcccgcctcctcgtccagttccactcgattctggcacaagcgaacggcggcggtcacagcatgttggcagcagagcaagaaccggaagcgccgcttcaaaaccggatgcagtcactgtggtgcaaccggcggttccgtgcgaccggccaaaggatggaaggccgaacacaaggccgcccgcaccctgggcatcatcatgggcgtctttctgctctgctggctgcccttctttctgtggtatgtcatcacatcgctctgcggtccggcctgcccatgtcccgatgtgctcgtggtggtgttattctggatcggttacttcaactccacgctaaatccgcttatatacgcctactttaatcgcgattttcgcgaggcattccgcaatacgctggagtgtgtgctgccctgtctggagaaacgaaatccgtacaacgcctactacgtctag

SEQ ID NO: 189 - protein, 603 aa, Drosophila
MSGVNVADLLATTMTLPITAAAGAATSQAAATSATNASHLQPATLTGHISTTAAAKTTTTPTSSLPITSQFVDASLTSLSLTATSSDASYSSPFSSYLSSDSTFELLSTVGPNITANGSDIAVDNQAELEESWLDLSLLLLKGFIFSSIILAAVLGNALVIISVQRNRKLRVITNYFVVSLAMADMLVALCAMTFNASVELSGGKWMFGPFMCNVYNSLDVYFSTASILHLCCISVDRYYAIVRPLEYPLNMTHKTVCFMLANVWILPALISFTPIFLGWYTTEEHLREISLHPDQCSFVVNKAYALISSSVSFWIPGIVMLVMYWRIFKEAIRQRKALSRTSSNILLNSVHMGHTQQPTSLSYLHPSDCDLNATSAREETHSALSNLERPRGITFAAVPSPLPKCPLCGADISSTTGTTANATATANADSTIDTTVTTSSKRSIHEQTPDLGQRPASSSSSTRFWHKRTAAVTACWQQSKNRKRRFKTGCSHCGATGGSVRPAKGWKAEHKAARTLGIIMGVFLLCWLPFFLWYVITSLCGPACPCPDVLVVVLFWIGYFNSTLNPLIYAYFNRDFREAFRNTLECVLPCLEKRNPYNAYYV

SEQ ID NO: 190 - DNA, 6617 bp, Drosophila
gttccgttacttggtctttgacttcttaccccagaatatgattcttggcagcaggagaaaccagtacgacttgttttggtcgtattatgagtgaaatattaccactcatgtcattttgaacgtctttaaagctcacacccttatggacccattataagaatatggcgtggcaaaatttcccatttttatcgaggctggaaaaacttttccacacatgcaatcatgtttcgtttcacttatcatggctaaaacctagcaaatagaaaaagtttttttttatccacaaacatatctgtattgagtgccagcaatctgtattgctttagcttaagatgtttactattaatagagccaagtggcaaatgacatacggcttacagagaaaataatttccaattcaattacatttacgtacatatattccttcctacaagcagacaggattattgatctaaatataaataaatatataataattattttaataatataatattaaaatgtagattaacagaatatattttttttgtatgaaagcctctagggtatttgtgtgacttttttctctctgcataagtgaagatgtttactattaatagagccaagaggcaagagaaaagtggcagcaatcaagtgcttttatttcgggactgcatgttaaaggcgatttcctgatcgaagactttggatacctgatgccatccgtctgaatgtgacgtcagcctggctggggattcaatttaaattcatccttgagtctaatgacttttaatgttgtttgcttcacaggcgagtgcgcaatttttgggcctgtcgtcgactgcttatcggctatgtgccaccgcagccgcaaaggatacgacagacaatattaataacgcattgatacgagtgggcggccgatttgcttttgtttttctttcccaacttggcggtggaaaggagtggtgtggcgtggcgtggagtggatagagtccacaattaatcgacgacagctagtatgttgcaaggcgtcgccatcaccatagccaacgacagcaacgatgatggcatcaatcaatcattcatggctcatgtgtcgcccagtcccaatcagagtccctccattggagtgggcatcggtatcgcctcatccacaatggcgaatcccagcgagagccccgagatgttgctgctgaagaacgacaaattcctaacacatgtcgcccatctgctgaacataacgaccgagaatctttcaaatctcctgggttccacgaacggcacaaatgcgagcacaatggcagcggattcgccggtcgacgagtccctgaccctgcgaacagccctcaccgtttgttatgcactcatttttgtggccggcgtgctgggtaatcttatcacctgcattgttatatcgcgaaataactttatgcacacggccaccaatttctatttgttcaacctggcggtttccgacttaatactgttggtctcaggtgagatggcatttttgagggacaccattgcgtatgcgtaatgcggcaaatatcctgcaggcatcccccaggagctgtacaacctttggtatccggatatgtatcccttcacggacgccatgtgcatcatgggcagtgtgctctcggaaatggccgccaatgcaacggttctcaccatcacagcattcactgtggagcgatatatagcaatctgtcatccattccggtgagtttttaacatttaaacgttatatatattttaaatatttatttacattattaaacaaatgtataatttcttcagtgttattgcctcgctctcattaacaaagtggatcatgcataattaggacagagaatatgaatagataaattaaacttgataagcgtcagtcggaaacattatgatatgaaacaacaaaagtacctcacaaattatgggcacaataattattcataactaaacagtctggctgtggaatgataaaacaagttaggcttgacaaccaaattcccatcgtttttaaatataccaaattcattagctttcatttatagacactaattaaagtcaggtccataaatgaaccaagttcattacagactatgtaattaagttccaataaatgcgttgtaaagatagaaagttagttagtcaattaattgcttagtaccaacatatttgcatttttggaatggtacaacaaaacttttccttatacaggtatcaccagttccttccaaatgttctgaccattttgcggtcaaagaatacaacagcttccttaagcgaaagcgtctggttttcatttacgatgttgcatttcctttagttcagaaactcttgaatagctagaagaaatgaaacttaaaaaccttacattgttgttttcaaacacaatttccgtttcttagcatttttcacaaattaattgttacgaatacaatcacttggagtatgtccttaagaatatgcagacacaaaagggtggttttctataagaagggattccaagtccgattacaaagttaaggcaaaaaactttcatgtctctgaagttgggattaaatattgttgtcgaaaagagtaaaaggtttctatgtttgccatttaatagtattatagttattttgaaacgaaaggatattcggacatgtgcttagcatgaaaaaggtctgaaacccattgcagtcactttaccaaaagaagttaaaagtgatgtctattaaatttggtatgaaactgtttgaattccttcccatttacacccacattcaaagtaaatatttatgttgcactcaatatcccaaaccttaaagagaaagttaaaaagcgtaaaaagtgtaggtggtcactgcgtgtactttacaaccgtaatattttccatcttatatctgcccacgtttatccgaaacatcgacatcatcttgtccttaatacttaacatataatgtagcctaatctttccgtcatttgtaggcagcacaccatgtcaaaattgtcgcgagccattaaatttatatttgccatttggctggcggccttccttttggcccttccgcaggccatgcaattttcggtggtctaccagaacgaaggatactcgtgcacggtgggtgggactgaaatgtgaaaaccaactgacgcatcatcgagtgtccttttcgctgtttattcccttagatggaaaacgacttttacgcccatgtgttcgccgtttcgggatttattttcttcggtggacccatgacggcgatttgtgtactgtacgtgctgatcggagtgaaactgaagaggagtcgactgctgcaatcgctgccgcgaaggactttcgatgcgaatcgcggcctaaatgcccagggacgagtcatcagaatgttgggtaggtgagttaagttggcggcttgattgattaaagacagcaatatgccccaccgccaaccagaaacaacaagaacatccacggctgtcaaaactttttccgccgaaagtcttaaattgaaaattactgtcaacgtatttgcgttggcgaacatcaaacagggaattcgtcatagccccgccctcattgccttccgcccacttcatttgcacttgcgtcatgtgggctgaacgtgcttctgtttttttccctcttttccctcaacggtgtcgttaatttttcgcaaacatcggtgcgtatgtgtaaagctcttaaatggccatctagcctatgaagcaaaggtgaagccaggtgtcacctcaaaagtaatcaagccggggcacttaaatgaactcaagactgctgggtgcacacagcaagcttaaatatttgtaaaaagtgtttcttgaatctatagacatatgtccgttaacgtgccacgttataagctgttaaattttaaaggaattcagcacacatctcgtgtattattcacatattttatttatataattagaaattcttatcaaaccatacagtgaataaatttaagtgtaaatccaggcccaattttagatcccaataagccgttttttcttacagcctacgaaacaacgtttaatttactgttgcttttaactgaaacaccgaccattgatttcgaaatttaccattggccctggcctgccaaatggaaattgatggaccaattcagattaagcccagagccttaaccataaattaatttggccagcaagagtggaaaaaaaacacacccgttctcagggcttagttattcatagatagtgggatattatttatcgtttgctaagaggtaataccttggcttttatcaaaatgtgatattttaccaaaggcccgtttgcgcaaactattcgatttcgggggatataaaagattaagaccactttcagtgtgagagagccccttttccggtgacctagttgttcaggggtcttaatacgttgcttatccttacttgaccgtatttgcagtagctgtagccgtcgccttcttcctctgctgggctccattccacgcccagcgactgatggcagtttacggactgaatctgattaatataggcatcagtcgggacgccttcaacgattacttccggatacttgattacacgtccggggtgctctactttctctccacctgcatcaatccgctactgtacaacatcatgagccacaagttccgcgaggccttcaaggtaagcccatgggatcaacccttctcagttaaccacttcataatagtaatctattattaattgggtccttcgcatgtttgtgaggacggtcacaaatgcagatgcttttaaagttaaatttaagctttaattattcaaaattgtttttcgtaaattaatgaattggtaatctatgtattttttacacttttaagatcactctgacgcgacagtttggtctggccaggaaccaccaccaccagcagagtcagcaccaccagcacaactacagtgcccttctccgccagaatggatcaatgcgtctgcagccggccagttgcagtgtaaacaacaacgcgctggagccatatggatcctaccgagtggttcagtttcgttgccgggatgcgaaccaccaattgtccctgcaggacagcattcgcaccaccaccacaaccacgacgataaacagcaacagcatggcagccggaaatggagttggtggtggtgctggtggcggtggcggtgggcggcgtctgcggaaacaggagctctatgggccaggtccgggtacagcagttccccatcgaatgctgcaggcccaggtgtctcaactctcgtcgctgggcgatgccaattcactgctggaggcggaggtggtggacagacactacgcatccgggcgagccaaaagagctctcttggccaccaaaagtggtgccctgctggtgacaccacctcaaagtggtgacccatcggaagtcagtcagcccgccactcgtctcaagctgactagggtgataagtagaagggatgaggtggccaacacaagcactccgcccttttgtgggagccacagtttgccggatccggagacttgtcaatcggcatcggtggctggtcgaagctcccgtaagtttccgtggcgaaaacgaaggcaaaaaacggaggatcccagcagcgagggcttgacctatggctcacccaaatcccagtgatttcagctggctggtagctagagttatacttagttaggcattgtttagttagcgcaataaacttttctatctgtaaataagccagaaaaagtcctgcgatttgaatgcaaatttcgggtgaccataaaaaatttaacgaatgggcatggtccagacaatttatgagagtcataaagccgggataatgaggctacggcgtatcgtgacgaatacacgccccacatcattttgcaatggcaaccgcatagcactcataaattaagtgttaagctaccagctaaataatgtgaataaataaaaattgttctcaatattacagcaaaatccttttaaatgcgttttcctttcacaatgcatgccagttacattcaagttcgcctgcattccaagttgtccaggatcaaagggaaaatcaaaaaaaacagtttacatctcaagttttgcaggtgcagcgtttccaagcaatctgttcctaccttttgcgacatttttcctgcagattgcctggcattctgttgatttcccacacaaaaactaaaagcgctgaaaaaaataaaagaagcataaaataaaataaagtgccaataaattagcagtcttaatattttcagagcccctcagaagcaaatctaggaaggaaaacatgacataaattttaaatggattgctcatcaggatatcgtgttgcagtagatatatatattttcgcagtgtaagtcacgactccacttgcacctggcaacaaagtttcagtttgcacctggcccattgccggaggtccattagtcaagagggctttgtaggctaggaagtccggattgaaacgaatgtgcagagagtggcacgaatgggcttatcctgcggtgaattggcacgtggagtgcatggagagtggtgtcggtgccacaaaataaatcaacttaaaagtagcatacaaatttaaggacccgactgatgttatgtccaaagggaattattaatggttctttaaaggcaggca

SEQ ID NO: 191 - DNA, 1983 bp, Drosophila
atgttgcaaggcgtcgccatcaccatagccaacgacagcaacgatgatggcatcaatcaatcattcatggctcatgtgtcgcccagtcccaatcagagtccctccattggagtgggcatcggtatcgcctcatccacaatggcgaatcccagcgagagccccgagatgttgctgctgaagaacgacaaattcctaacacatgtcgcccatctgctgaacataacgaccgagaatctttcaaatctcctgggttccacgaacggcacaaatgcgagcacaatggcagcggattcgccggtcgacgagtccctgaccctgcgaacagccctcaccgtttgttatgcactcatttttgtggccggcgtgctgggtaatcttatcacctgcattgttatatcgcgaaataactttatgcacacggccaccaatttctatttgttcaacctggcggtttccgacttaatactgttggtctcaggcatcccccaggagctgtacaacctttggtatccggatatgtatcccttcacggacgccatgtgcatcatgggcagtgtgctctcggaaatggccgccaatgcaacggttctcaccatcacagcattcactgtggagcgatatatagcaatctgtcatccattccggcagcacaccatgtcaaaattgtcgcgagccattaaatttatatttgccatttggctggcggccttccttttggcccttccgcaggccatgcaattttcggtggtctaccagaacgaaggatactcgtgcacgatggaaaacgacttttacgcccatgtgttcgccgtttcgggatttattttcttcggtggacccatgacggcgatttgtgtactgtacgtgctgatcggagtgaaactgaagaggagtcgactgctgcaatcgctgccgcgaaggactttcgatgcgaatcgcggcctaaatgcccagggacgagtcatcagaatgttggtagctgtagccgtcgccttcttcctctgctgggctccattccacgcccagcgactgatggcagtttacggactgaatctgattaatataggcatcagtcgggacgccttcaacgattacttccggatacttgattacacgtccggggtgctctactttctctccacctgcatcaatccgctactgtacaacatcatgagccacaagttccgcgaggccttcaagatcactctgacgcgacagtttggtctggccaggaaccaccaccaccagcagagtcagcaccaccagcacaactacagtgcccttctccgccagaatggatcaatgcgtctgcagccggccagttgcagtgtaaacaacaacgcgctggagccatatggatcctaccgagtggttcagtttcgttgccgggatgcgaaccaccaattgtccctgcaggacagcattcgcaccaccaccacaaccacgacgataaacagcaacagcatggcagccggaaatggagttggtggtggtgctggtggcggtggcggtgggcggcgtctgcggaaacaggagctctatgggccaggtccgggtacagcagttccccatcgaatgctgcaggcccaggtgtctcaactctcgtcgctgggcgatgccaattcactgctggaggcggaggtggtggacagacactacgcatccgggcgagccaaaagagctctcttggccaccaaaagtggtgccctgctggtgacaccacctcaaagtggtgacccatcggaagtcagtcagcccgccactcgtctcaagctgactagggtgataagtagaagggatgaggtggccaacacaagcactccgcccttttgtgggagccacagtttgccggatccggagacttgtcaatcggcatcggtggctggtcgaagctcccgtaagtttccgtggcgaaaacgaaggcaaaaaacggaggatcccagcagcgagggcttgacctatggctcacccaaatcccagtga

SEQ ID NO: 192 - protein, 660 aa, Drosophila
MLQGVAITIANDSNDDGINQSFMAHVSPSPNQSPSIGVGIGIASSTMANPSESPEMLLLKNDKFLTHVAHLLNITTENLSNLLGSTNGTNASTMAADSPVDESLTLRTALTVCYALIFVAGVLGNLITCIVISRNNFMHTATNFYLFNLAVSDLILLVSGIPQELYNLWYPDMYPFTDAMCIMGSVLSEMAANATVLTITAFTVERYIAICHPFRQHTMSKLSRAIKFIFAIWLAAFLLALPQAMQFSVVYQNEGYSCTMENDFYAHVFAVSGFIFFGGPMTAICVLYVLIGVKLKRSRLLQSLPRRTFDANRGLNAQGRVIRMLVAVAVAFFLCWAPFHAQRLMAVYGLNLINIGISRDAFNDYFRILDYTSGVLYFLSTCINPLLYNIMSHKFREAFKITLTRQFGLARNHHHQQSQHHQHNYSALLRQNGSMRLQPASCSVNNNALEPYGSYRVVQFRCRDANHQLSLQDSIRTTTTTTTINSNSMAAGNGVGGGAGGGGGGRRLRKQELYGPGPGTAVPHRMLQAQVSQLSSLGDANSLLEAEVVDRHYASGRAKRALLATKSGALLVTPPQSGDPSEVSQPATRLKLTRVISRRDEVANTSTPPFCGSHSLPDPETCQSASVAGRSSRKFPWRKRRQKTEDPSSEGLTYGSPKSQ

SEQ ID NO: 193 - DNA, 4902 bp, Drosophila
ttgggcaaattaaggaaactttttgtggtttcagttactcgtttaagccacattttcccaacatatgctgcactttatgaattaaaagtcatttattttaggctgcacacacgttatgtttgcctgacaaattgcatttgctgaaattaaaacaaaatgcactgggacactgcgttatggcatgctgctaattagtcaccaacagcggctttcagcgaatgttggccaatcgcgagaatggctttcatccactgtctagactccagaccaaaaagcgaatttgtgcgccagataaacatcttaatggccagggattatgatgcagtgcccgctttttactgacagtaattagccagacgcccattgaaccctcttcttgataatccccacttgatccacactctttcaaaaaaaaaaaatgtattcattaaatgggaaaaaaatatttactgcaagagaaatgttattaatggatattgaaaaactgacattagataacagtttctattggactgctaacaaagtcggtcagctgtttaaaaaactgagatcgcttttatatttaaattgtataataaaaccattagggtatcaaccttaatatgtatttatatatcactgtactccaaatactatttacgcttaactatgtagattcattttatttttatcaaaagtccattctttttttattaaactccactttataaatgaaacaacggtcgaatttttgaactgagtacataactacatagtttattcgattacgtgcactataactataattcgaactatagctttgggctatattacggttattggtaaggacaaccatataattgaccccaaacgcggaatatttgtctaaattaaaacacaaacaagctggagtggcgcttgctgctcgtatcacagttgtgtgtgtgtgtaatgtacgtaggtggcactggaatggactacctcgcttatcgagtacagatagaggatatgctgaccccctttaaaaggcggcccgctcttcagtgtcgcctccattcaccgtcgcccccttttcgtgcggtttgtggctgcctttgcgtctggcacgccaattgaatttggtcctgagacccttgaacgggcttgagctcttgagcactttcactttcgccttgcgcactttgccactcgactcgtcaccgctcacgccccccgaccccgcggcccctgttgtgctgcctcctgccacgccccccgtcacacctcctggtgggcgggtgatgcgcgtaagtttaaggcgtgaccgcgagatggccaagtcatctgtgagctcgtcaatggagcacatcgtgggctggcgctgcagtggctccccgggaaactgcaaatcctcctccaagagggaatgggcatcgcccaccgatgacagctgcgatatttgcgtctggagcatgcgacgcggattatcgaagaggtcttgccggctgcgattctgaccctgcatctggacactgtccaaggacacgcggttcaggcgcaccgactgacccgttgtcgttccattgccactgccattggcagagccatttagcccagtggtggtcgtcgccatggaagtcattgtggtgcgaacgctgtcctgcaggaggaaatcaaggaatggagggataatcagaaagggaaagtgcagtcgccagacacgaaaataagtaacgcaataaacatcttatagtggttttaaaaagtctcgtgattcaaatttcattttgagaaacaggacatacactatattaatccttttcattttcctcttaaataatgccacataatagaatttaagtgcatatatcgaatgataattatgtaatttttctcagtgcactcaccgttgtgtgcagccgcagtgaacccgtttgattacgtcgaagagcgctgtaagtatgaggaagcccccttccctgatttttgccaccaagtccaaagtgtctagccaaagttacctaaaatgggattaaatacgttttttaattctagcttgaagtttaaaatcactaaattgaccgttaaagaatcgattaataaacttgtaacctgaagcttattttcaatttcctaacgcaagctatagaaatgaatatccggcagcgaaactcaccttaaaagcctcacgaaacttgtggctcatgatgttgtagagcagcgggttgatgcaagttgagaggaagtagagaacaccggacgtatagtcgaggatgctgaacacgtcgttgaaccactgggactcaatgcccgaggtggatccatagaccgccatcagccgctgggcgtgaaagggggcccagcagatgaagaaggccacggccaccgccactgggaaagttggataagggcgcctgatgcaaccatgagttatttcggatatttcatatcctgcttacccagcatccggatgactcgcgtttgggcgcttatcccccggtttacatcgtaacatcgcctgggaagcgcctgcaggagtcggctccgtttcaacttcaccccgatgaggacatagagcacgcagatggccgtcatgggtccgccaaagaacaggaagcccgacacagcaaacacatgggcaaaaaagtcgtttttcatctacagcaggcatttcacaaaaataatatatatgtgtattcgcatgcgatacgatatggttttggcttacagccacagccggaaggcaatggctgtaaatttgattgcctaaactgagtcgaacctcgtaagggattgtcgctgtttttatcatgctcttaaattttttgtaattcacaaaggctctctattcgaactttctatacggaaaacacataatgaatcaaaggatcaaaggaccggttctacgaatcaattaaccaggtaactcataactgggggacatacgattaagggtctcgcatcaatcatacgcaccgtgcacgatgttcccatgccctgcatcaccacggagaactgaatggcttggggcagggccagcaaaagggcagctatccagatggcaaatatgaactttacggcccgtgacaacttggacatcgtgtgctgcctgtatcgaaagcagaaccaattaagcaagtttggggcaaaatggaaatgggcagtggaaggaatgaaggttcccttacctgaacggatgacaaatggcaatatatcgttcgactgtgaacgcggtaatggttagaactgtcgcattggccgccgtttccgagagaacgctctccaatatgcagatgctgtcactgaaaggataattatccgggtgccagaggttatagaggtcctgcggcattcctaagaacataaatagcaaaatagcaaaatatatagtgtgattataaatatttaataatagctgaaattatagcctatagcctcaaaatgcaaatcgatttgagcatctgccgaatatctcactctacattttcttgtttatttacaaattttaatttaatatgcctcagttccatttattgtttgcactactgaactgaattaaattataattcaaaaaccatgaacattttagttttgcactcacctgagcataacaaaatcatgtcggatatagcgaggttaaacagataaaagttggtggccgtgtgcataaagttgttccgcgaaatgacaatgcatgtgatgaggttgcccaaaacgccggcgataaatatgagggcgtagcccacgcttagggtggccagcagtgaaagtggtgtcatcggggtcaccgtgggcaaaagctcctccggctccaggccctggagaaggctggtcaggttgtccgcggagatgttcagcacttgtgtcagatttaagagaaatttctcattgtgaaacagttgtagatcggttgccaggacaccggaactgttagtgggcagcattttgactgccatagggtgtgtgtctttgtgtgtgtgtatacgcactattattttcgaatttctttggaaatttcagacttctgcgtatgtattctcaatcgaagctttcgcttgcaaataatgttttcataacgccccttacgggggctcatcaatttcgacttaggccagagccactccacttgcaatctgttgtcatgagtgtgggattaaattatgtgtacggatgtgtgtgataaggtggaccctatgtgctatttaaataaaactatgtttttcaaaatttgttaaaatttaaataaaataatacaagacaaataacgcattttaacgaatttagtaataaaacaaattcaaacattaaggctttttactccagatttctaaattaccataaattatacatatacacaatttggttggtaagctgtgcgctttgtttagcttgctaaggtccaccttagagagcccgtcttaaagcgtgtttgtgtcctgtgtgtttacctggcatcctgggaaactggcaggcggcagtcaggcgtgtcctaggcgaaagaccaggatcagggcgagtggaagctgaaaattaatttgaattgctaagtggcatttagtcaaaatatttgtgtacactggatgaatttaaggatgttgctacaaggctgagaaggacaggcctgccgatccgtctcccacccaacaccaggtggcaaacgaatgaaacgagccagaagctcaaggtcaggtggtggataagacggataaggagacgacgatggcaaatggacaccgggtgacttaataacattaacatagtttcattccattcagatgatgagtgttttcggctgctgctgttctgctctgttctgttcacattctggctatacttttcgttattgttgctgctgaccgctgttgaccgtttttggacgttttcattatcattatcataaaaaagtttctacaatatatgcacaaccaaaagaatgctgtcgaa

SEQ ID NO: 194 - DNA, 1788 bp, Drosophila
atgctgcccactaacagttccggtgtcctggcaaccgatctacaactgtttcacaatgagaaatttctcttaaatctgacacaagtgctgaacatctccgcggacaacctgaccagccttctccagggcctggagccggaggagcttttgcccacggtgaccccgatgacaccactttcactgctggccaccctaagcgtgggctacgccctcatatttatcgccggcgttttgggcaacctcatcacatgcattgtcatttcgcggaacaactttatgcacacggccaccaacttttatctgtttaacctcgctatatccgacatgattttgttatgctcaggaatgccgcaggacctctataacctctggcacccggataattatcctttcagtgacagcatctgcatattggagagcgttctctcggaaacggcggccaatgcgacagttctaaccattaccgcgttcacagtcgaacgatatattgccatttgtcatccgttcaggcagcacacgatgtccaagttgtcacgggccgtaaagttcatatttgccatctggatagctgcccttttgctggccctgccccaagccattcagttctccgtggtgatgcagggcatgggaacatcgtgcacgatgaaaaacgacttttttgcccatgtgtttgctgtgtcgggcttcctgttctttggcggacccatgacggccatctgcgtgctctatgtcctcatcggggtgaagttgaaacggagccgactcctgcaggcgcttcccaggcgatgttacgatgtaaaccgggggataagcgcccaaacgcgagtcatccggatgctggtggcggtggccgtggccttcttcatctgctgggccccctttcacgcccagcggctgatggcggtctatggatccacctcgggcattgagtcccagtggttcaacgacgtgttcagcatcctcgactatacgtccggtgttctctacttcctctcaacttgcatcaacccgctgctctacaacatcatgagccacaagtttcgtgaggcttttaaggtaactttggctagacactttggacttggtggcaaaaatcagggaagggggcttcctcatacttacagcgctcttcgacgtaatcaaacgggttcactgcggctgcacacaacggacagcgttcgcaccacaatgacttccatggcgacgaccaccactgggctaaatggctctgccaatggcagtggcaatggaacgacaacgggtcagtcggtgcgcctgaaccgcgtgtccttggacagtgtccagatgcagggtcagaatcgcagccggcaagacctcttcgataatccgcgtcgcatgctccagacgcaaatatcgcagctgtcatcggtgggcgatgcccattccctcttggaggaggatttgcagtttcccggggagccactgcagcgccagcccacgatgtgctccattgacgagctcacagatgacttggccatctcgcggtcacgccttaaacttacgcgcatcacccgcccaccaggaggtgtgacggggggcgtggcaggaggcagcacaacaggggccgcggggtcggggggcgtgagcggtgacgagtcgagtggcaaagtgcgcaaggcgaaagtgaaagtgctcaagagctcaagcccgttcaagggtctcaggaccaaattcaattggcgtgccagacgcaaaggcagccacaaaccgcacgaaaagggggcgacggtgaatggaggcgacactgaagagcgggccgccttttaa

SEQ ID NO: 195 - protein, 595 aa, Drosophila
MLPTNSSGVLATDLQLFHNEKFLLNLTQVLNISADNLTSLLQGLEPEELLPTVTPMTPLSLLATLSVGYALIFIAGVLGNLITCIVISRNNFMHTATNFYLFNLAISDMILLCSGMPQDLYNLWHPDNYPFSDSICILESVLSETAANATVLTITAFTVERYIAICHPFRQHTMSKLSRAVKFIFAIWIAALLLALPQAIQFSVVMQGMGTSCTMKNDFFAHVFAVSGFLFFGGPMTAICVLYVLIGVKLKRSRLLQALPRRCYDVNRGISAQTRVIRMLVAVAVAFFICWAPFHAQRLMAVYGSTSGIESQWFNDVFSILDYTSGVLYFLSTCINPLLYNIMSHKFREAFKVTLARHFGLGGKNQGRGLPHTYSALRRNQTGSLRLHTTDSVRTTMTSMATTTTGLNGSANGSGNGTTTGQSVRLNRVSLDSVQMQGQNRSRQDLFDNPRRMLQTQISQLSSVGDAHSLLEEDLQFPGEPLQRQPTMCSIDELTDDLAISRSRLKLTRITRPPGGVTGGVAGGSTTGAAGSGGVSGDESSGKVRKAKVKVLKSSSPFKGLRTKFNWRARRKGSHKPHEKGATVNGGDTEERAAF

SEQ ID NO: 196 - DNA, 9889 bp, Drosophila
taattgctgccgggtaattgcaactgagctcaggtcagcgagtttgctaaccatggcgtcattatactgttgcactataaaatcattcgacccaagtccgattaacttaagtgggtcttagaccaaaagatgtgtatttcgaatacttctcaaacgttatttccttaagtcaaatcatttcaagaactgggagagcaaataaatatgcgatttcctcgacttatagttacttgtgtgaaatttgcgcgcttgtgcaaattcgaatgtttgcaacttaattggactgcataatagattgggcaaaaggattttataacaattccagtgtccagcccatcgtactgatgtggctaattgttttgctgacttgcacctaggcaaagcaatttcccttgaaaacaatcaaattcaaaacaatcaagtaaacaagacagctgagtgaaagactttggcttcatgggtgaacatatttgtcggttgaaggttgagtttttgtttaagatgattgcacatggcacacaggttgattttaatctaaatttaatttgagcatttgagcatttttctgctgaaccgggaaaacccacatttgcttacctagaaaaaccggttttcagagaaagttgcgagtaatacatatttaatacgatttcaagtcctgtgtgtacaacgttttatctaagaaaaccagaaaaccagaagctttttagcttagacagctttaatatttaattacagtgttcacaaaaaaaaaaaacgaaattccccttttctttgcttcaaatttaattagacatgtatctattgtttttttttttccacttgcagcttatttatccaacctaagccaactaaatgatgcaatgctggtgacatataaaacgaaagtggaaacggagttcattccttaagtaaccaatttaagatgttgtgctcccaagatccctaaaccaccgtccaaacccttcgaataacttatttaagccaagatatagacaaaatggaggacgagtggggctcctttgatcgtctgcccagtgttccgagtgcctcgatggatttggagacggaaaacgaggtggtcagcaattggtccacactggccaacttcacgcgacttgtggctggtgccgctcctgaaatcgtcaactatacgctcaacatgatcgacgtgggtgtgggcatggccacggatatatccaatttgagcgtgagcaccacgcccctgcccgcctacgcaatctccaatagctcctcactggcgcacaccaatagtcgccatgaagcaccaccgatggcggaacaggttccggagcacgtgatggatcacgcacctcaactatcccgatccgggttgctgaaagtgtatgtcctggcggtaatggcactgttctctctgctgggcaacctgctgaccatctggaatatctacaaaacccgcatctcaagaagaaactcacggcacacgtggagtgctatctactcactgatgttccatctgtccatcgccgatgtcctggtcacctggttctgcattatcggggaggccgcgtggtgctacaccgtccagtggctggccaatgagctcacctgcaagctggtgaagctcttccagatgtttagcctctacctgagcacctatgtcctggtcctcatcggagtggaccgctggatagcggtcaagtatccgatgaagtcgctcaacatggccaagaggtgtcataggctacttggcggtacttacatcctgtcgctggtgctcagcttgccacaggtaagttttgatacactgaaaataagacctttaaagttcttataaaatcatttgcctagaacaaacagataagatagttacacaaataagcaagattgtaataatataaaagtcatttttggcctataaatggtctaaaaatatttgtgggatatgttagattcaatctttagataatttaaatgaaaaaaagttaaaggtgccctttgattaggaaatcagtaaaagctttaagatctcctcttaatttatgtaccctttcggaaaatttctgttcgacgtaaatgcaaaaagccttgagggtacccgtaaaaacattattctatttaaaaagatttagccaaagggcaaatttaaagcgtctgcatctgaaaaaatggcccttccagtgaagtgcgaagaagacacgcttatgaaaataatccagtcacttttggtggggcgttccattacgctaagttaaagctgcgacttagccgtggtaatattcacctgccactgcccctgcctgtgccccctactcctggcactccatttgatccttacgctcgcgctgatgaagttgaaataatatgtttactttataacacgtatacgccccgtggcacagtgcaaatagtcttgagtaggcgccagaatgtgtgcagacattaaaaatgattgcctttcgcacaataagtgtacactaaatgtggctttaggccgctgccacgcccacacacacgcgtgctgatgggcgtaggaatgggcatagggttgggcgtatggggacacccaatcgaattccggtcgtccgaccgacaaagggtttttttcttctggtttttcctctcggcttttcgcttggggacgggcgaccaaataaaaaaaaaaaaaggtccgaacaagtgtgtcttctgcctgacgacagacattattcatattcccgatttcggttctttgtgcgcagataggcacactgggtgatatattcctttgccctggcagtcagctggcggataagcctgaatgggactgcattaatgggcgtcactcgctttgttctacaactctagaacgactcggcttcagatttccggcaccctgattgtataatatatgccgcgtgtctccacatcccgatttcatactcgattcgcctggcctttccttgatttatggccccgggtgaggcacttcacttctcgaattcagttaatctttagctggagtgctacgagctcctgctcgtgtttttccttaaagtggaaattcgtggacacttcagtttagggtgtcactaaggtaggtaattagcacgaaatctcacttcaaagttgccaagggttagtaatatagttagattgaaaagtgactgcaaactttccactgctctttatgtgacccgggtcataaatatcgttcgcagaatttggttagccataagtggggacaagtgggtagaaaggtcaaaccttctgtataaaaagatttgtcacctgagagatgccaaaaatagatgaaaaagaaccaaagggaaatttcctcctaagtggatggtaagtggatttcccgcacgcaagttatgcaactagcacactttccccactgctcgcccgcaaatgtatgctaaaatgtagctcatttaattagggagcccagcaacccgacgccatttccttttatctgaataatgtattgcgtggaacaataattacagacgtaccgtacaaaaatcgaggcgagattatatttgctcactttggggcaaaatgtgtgtgtggtttttctgggtgcgaaggcatgcgcgagtcagtttgttaaatcatctgacttgtttaaatgccgcaaaaaatctactgagcttaataacattttgatgtttttttccaatcgatgtcaagcggaaaatttggccgttttgttgctgggaatttgggccgacttttggtccagccgacccataatggaaaggacataatgtattggttttggatttttaaaatagaaccagactttgatgaactgtccagcttgggtgtaaatatttgatgacgaacgtcacaaattacgatgatatgacagaagtcatttatggatggccactgacacccaattaaaagaaactttgcaatcattaagccaatttttatggtccacttttcgacatctcgctgagatcccgggaaactttcttcatttcgcttctactcgaatatgcgacataaaatttatgccgcttacagacgtgacggtcgaaacgttcccgccggaaacgtaggaatcatctcaaacaattttccggataactttttccatgtcacacgttcatggtgcaggcaaccaaacagccaaccaaccaaccaagtggcacatgtattggtaaggagccacatcgaatccaatatgagacgcgccgctgaactcgtcggtttcaaataaaggagcgaaatgaaaattcacttcgactgccaataaacaacaaatgttttcaacagcagcatttatttggctccacttctatcgaccccaactcctccgcgtccttcgaacccaaggaaaaaagaaaaaaagtttagtaccacacgcacacaaccacacagaagaatcctgccacaataactcgaagtgtgagcccaaaaatgtggcacaatgaaaacaggccgccataatacagtcaaacacaaagttatccacaggtcctccgcagagtattattgcgaattgaatttcacccacatatcatcaaattcagcagccttaggtggcataattaaaatttcgtagaattgtttacaaattggagggaactagtcaatattacaagagtcccttggcgatttcaccttcagtgtgcgcgggcttttgataatcgataggggtccttaaatgcttagctttaagtgaattaaaatttgaatttagtttcagaatatttacagcagaatttgaatcaataattgcaatttatatgtgcaagcattggcgaataaagtaaataaccggatttaattattaggtgacaaaatcgtaacatttaaatatatttacctgaataacaattggaaataagtgcaaaaacagcaaaaagtataataaagtttagataaaaaatgaaatccatttaatattttaatttgggctcatctggattcatattttaggtgacaaaattaattattataattattaaaacaaatgagcaggtaacaagtcagtaagctctaacaatccttgttaaatctaacttaaacgtagctgagtgtccaatttaaatggtcaatttaatcgtgcctttaagccaaacaaatatgtatattttaacaatctgatagttttacaaacgtcttaaacgattgccaagcacctgaccgatgtgtgaaaactacgaacttgagcaatacaatttggttagaacggaagttcttgaagttgttccctcacaatgaatcaatcttgttttattttactgtcgcaagtttttgtctaaagtttttcgttgcaacttgtctaactttgccgcaaatagtgctgaaggcttgcttgtgtgtggcatggttttagcgtggagcgccctttaaacttttcgagcatttttaatgaatggcaacatggaaataatgaacaaacacttgaaaagttgaaataatttaagaaagaatattgaaagccacaattatccttgctttcttttactagtcatgacctataaaaatatatttttctactataaaaagccactggcactttacttcggtttcggcggaaggcaatggcttggaagttataggcgaaattaataaaaatcaaccattagacgattatccgcttctcgttatttctgcgcggggggtttttgtgtagtttttactacgccactcggcggagcgcggaaagttttcccatttcctccatttgggtcagctgttgacacagcggccgccagaaaacccataaaaagcgcaaataaaaatacttttagcgtattagttatgcgtagacacatccatcgttggtgtatttaagatgctacacttcctttatcagttatggccacacattttcctgctcgaaaagctttttcatggtacgagaatttccacctttctacgtggcactctgctaaactcggtaagacttgaacaatggagcagtagcaactgcagaatgtatacattttccaaaaatgttccatcaatttggaaatgatttcagccaaacaagaaaatcaagcaaaagcacttttcacccataaccaagccgcttgccacccacaatggaaagtagatcaaagccacaacgttttgagtcagcagtttgttaccatggaccgcatgtgggtatttccatgtaaacatgcctgtacttagtccttggtgcaatcaggacatggatggtttgctaataaaaatcttattacggcaccatcttatttacacaacacggtagagatatatggttttaaaaatttccattttcctgcttaaaacaggcaataaattgataggaaggtaaatatccttaagaaacacttgtataaagttcaagttcaatccatgtgtcttaacctttaattgtttactatgttgcatgttcgttccagttcttcatcttccatgtagcgcgtggcccattcgtggaggagttttaccagtgcgtcacccacggattctacacggcggattggcaggagcagatgtacgccaccttcacgctggtcttcaccttcctgctgccgctgtgcatcctgtttggcacctacatgtccaccttccgcaccatttccagtgagttttcagcgagaaggagtttacattcccgtactaacctgataacctgataatcgtgcaggcagcgaaaagatgttccagggatcaaagttggccaactactcaacggccaaattgcccacacagacgaatcgccagaggctgatacacaaggccaagatgaagtcgcttcgcatatccgtggtgatcatcatagcgtttctcatctgctggacgccctactacgtcatgatgattatgttcatgttcctcaatccggacaaaagggtgagtttccgcccgttcccctgccgaatttgaagctgaatgacaagcagatatcgattcctgataccaaaaggctcatcaatcagcagtcgatttgtcagtttgtagcgcacggtttgggcgaatcctttgtcctgttccctaccatatttacgacttggggtcatggttgtacgagtaaaataaaaacgagaatacgacacgacctagtcgcagctggcaaatccgtttggagctatacccactgccataaaaatgatttcttatgctcaatttttaattaatcgttacgccacccgaccgaccacacggtcgcaatttttccttaacggcgtacccaactttgatgacttgccagagatggtccgtaaaagctggcccaagttgcaagattacggcgaggcaatccgggcagaaggaacacaaggtcgaattgctacaaaccgagcattctgtacagtaggggaaaatgaatgagtagcaaaatatttccaaagtttatttgtttcgatttaaattttaaaaatgctataattgacaaaatagaatcatttttgctgtcactatttttaagtgaatgggatatttgtccgccgattaacctgaatttcatatcctaatgaattggattgcacattcataatggcatttccgctgaaactctttctcgctgtggaaatcccagcgatggcagtgtgcaaaataattaatttggaagccaaatttttagcgcagtgtatccataagcgacctgagccccaattcgaccgcaggaacgcccacaatgcgcccacgcgaatgtagaggggaaaaggtgaaaggtgtgcgacaagggcaaggaaattaatttgaatttcacggattgcttgcagctgggcgacgatctgcaggacgccatcttcttcttcggcatgtcaaacagcctggtcaacccactcatctacggtgccttccacctgtgtcctggcaaagggggcaagtcgagcggcgggggcggcaacaacaacgcctacagcttgaacaggtgagtggtgagccaacagaataagttaattctattaaccaccacatttcgtacttgtttttgcgcttttatcgtgtcaaaaaatagttacttttcactcaagcaatacacttttaagacagccaagcaagcttttgaagtctgaattgctgcttttctgatcaaagagtttttattcttggtaatatttcacatttaagagtataaatgatagtgtaaatttaaataaaatagtagaaagttttccctaaagatcgatgtataactattaatacatattttacttaatctagtgttgctttttaatgacagtttttgctgtgcttaaatttttacaaaataaatcttaaatccttgcaaagagttttcttttatgcaaatggaaaacattgtttcatcgcttgttaatatcatttactttatttatttattattctaaacagctgccaaagcagcgaactatctcaggatcagatatgatttgctatgattttgtcacacttcctatgtttgttttgataacgcaaaaagcacacacaccgtgattggcaataaactgataaattcttttccgtctggtttttatcacctcaccgcatcgtccattcccccgtccactttccatccgcaggggcgactcgcagcgcactccatccatgctaacggcggtgacgcaggtggacggcacaggtggcagttcccgccagatgcgggccttccgccagcagagctactaccgcagctcctccaacggcacagccggaccgggtgcagctccctttaaggagcaggttggcctgctgcacgtgggtcccggcaatgggacgcccggtggctccgtctctagcggcgccacgccgcagttgatccgtaagggatcggctctgttggcccgacaacccagctgtctgagggagcaggagcaccagcagcgtttgctgctgcacgagaagccctcgaccctggtgctcagctacgacagccagcggggcggagtgggcgtgggcgtggccagcggtctgctggacaacaacgagcgagtgtcgagcgtgtgagagcagctggcgatggcggtagcggcggcggcggtggcggtggatgcaccggacacagtagaagcagcagcagcaacagcatcagccgatgcggatgcgaatgtggcgatggaggacgcctgctcctgctgccattgcctgagcagggagctggtgcggcggcagttggagctccaagtgcttccagtgcagtgaggcgactgccagtggatttgatccggctggctgagtggccggagctggggattccagcgattccctcggtcaacgtggggagtggcgtcgatgattagatcaccggggcgtgcaacatgtgcttagatagtgctaatcgagagttaagtcttcaaacacaatgggtgtgcttagaagtagcgtaggattagagctagtccgtacgaagtggttgccctacactgggagaaactcgtggtcactttgcatgttctctgaatgttctactaatacttgacttcaacaaggatacaaatataagagataatatctatgtacatcccataaaaccataaaaaattgcaattaaatctggttgtgaaaaaaatagatttaacttctgaatgtttcaaatgttgccaattcgccagcgtgtaatccgatataagcaacaataattacaattataatcaatgtgcaatcagagtcagttacaatttacaattatatgactgaataattggactatgaatatatacgacttcaaatgagtttctctcattagcagggcaactttgtaatgttaattaacagcgtttttcagtttttcattttgttcccccagccgagtaactcaaaaatcgattctataattgtgtaaaatagaaatcatctaaaaacagggtaaatctaactattgtaaatacatttactcattattttgagaagaatattgtaaaaaaaaaagattgtaaagtttaaaataaatatgagttcatgttcaacgacacaaggaattattttgattaatttaaagtactaaaaa

SEQ ID NO: 197 - DNA, 1644 bp, Drosophila
atggaggacgagtggggctcctttgatcgtctgcccagtgttccgagtgcctcgatggatttggagacggaaaacgaggtggtcagcaattggtccacactggccaacttcacgcgacttgtggctggtgccgctcctgaaatcgtcaactatacgctcaacatgatcgacgtgggtgtgggcatggccacggatatatccaatttgagcgttccggagcacgtgatggatcacgcacctcaactatcccgatccgggttgctgaaagtgtatgtcctggcggtaatggcactgttctctctgctgggcaacctgctgaccatctggaatatctacaaaacccgcatctcaagaagaaactcacggcacacgtggagtgctatctactcactgatgttccatctgtccatcgccgatgtcctggtcacctggttctgcattatcggggaggccgcgtggtgctacaccgtccagtggctggccaatgagctcacctgcaagctggtgaagctcttccagatgtttagcctctacctgagcacctatgtcctggtcctcatcggagtggaccgctggatagcggtcaagtatccgatgaagtcgctcaacatggccaagaggtgtcataggctacttggcggtacttacatcctgtcgctggtgctcagcttgccacagttcttcatcttccatgtagcgcgtggcccattcgtggaggagttttaccagtgcgtcacccacggattctacacggcggattggcaggagcagatgtacgccaccttcacgctggtcttcaccttcctgctgccgctgtgcatcctgtttggcacctacatgtccaccttccgcaccatttccagcagcgaaaagatgttccagggatcaaagttggccaactactcaacggccaaattgcccacacagacgaatcgccagaggctgatacacaaggccaagatgaagtcgcttcgcatatccgtggtgatcatcatagcgtttctcatctgctggacgccctactacgtcatgatgattatgttcatgttcctcaatccggacaaaaggctgggcgacgatctgcaggacgccatcttcttcttcggcatgtcaaacagcctggtcaacccactcatctacggtgccttccacctgtgtcctggcaaagggggcaagtcgagcggcgggggcggcaacaacaacgcctacagcttgaacaggggcgactcgcagcgcactccatccatgctaacggcggtgacgcaggtggacggcacaggtggcagttcccgccagatgcgggccttccgccagcagagctactaccgcagctcctccaacggcacagccggaccgggtgcagctccctttaaggagcaggttggcctgctgcacgtgggtcccggcaatgggacgcccggtggctccgtctctagcggcgccacgccgcagttgatccgtaagggatcggctctgttggcccgacaacccagctgtctgagggagcaggagcaccagcagcgtttgctgctgcacgagaagccctcgaccctggtgctcagctacgacagccagcggggcggagtgggcgtgggcgtggccagcggtctgctggacaacaacgagcgagtgtcgagcgtgtga

SEQ ID NO: 198 - protein, 547 aa, Drosophila
MEDEWGSFDRLPSVPSASMDLETENEVVSNWSTLANFTRLVAGAAPEIVNYTLNMIDVGVGMATDISNLSVPEHVMDHAPQLSRSGLLKVYVLAVMALFSLLGNLLTIWNIYKTRISRRNSRHTWSAIYSLMFHLSIADVLVTWFCIIGEAAWCYTVQWLANELTCKLVKLFQMFSLYLSTYVLVLIGVDRWIAVKYPMKSLNMAKRCHRLLGGTYILSLVLSLPQFFIFHVARGPFVEEFYQCVTHGFYTADWQEQMYATFTLVFTFLLPLCILFGTYMSTFRTISSSEKMFQGSKLANYSTAKLPTQTNRQRLIHKAKMKSLRISVVIIIAFLICWTPYYVMMIMFMFLNPDKRLGDDLQDAIFFFGMSNSLVNPLIYGAFHLCPGKGGKSSGGGGNNNAYSLNRGDSQRTPSMLTAVTQVDGTGGSSRQMRAFRQQSYYRSSSNGTAGPGAAPFKEQVGLLHVGPGNGTPGGSVSSGATPQLIRKGSALLARQPSCLREQEHQQRLLLHEKPSTLVLSYDSQRGGVGVGVASGLLDNNERVSSV
